(19) United States
(12) Patent Application Publication
(10) Pub. No.: US 2019/0185859 A1
(43) Pub. Date: Jun. 20, 2019

(54) RNA FOR CANCER THERAPY

(71) Applicant: CureVac AG, Tübingen (DE)

(72) Inventors: Mariola FOTIN-MLECZEK, Sindelfingen (DE); Aleksandra KOWALCZYK, Stuttgart (DE); Regina HEIDENREICH, Tübingen (DE); Ulrike GNAD-VOGT, Mühltal (DE); Ute KLINKHARDT, Frankfurt (DE); Katja FIEDLER, Bad Urach (DE)

(21) Appl. No.: 16/326,281

(22) PCT Filed: Aug. 14, 2017
(86) PCT No.: PCT/EP2017/025230

§ 371 Date: Feb. 18, 2019

(30) Foreign Application Priority Data
Aug. 19, 2016 (EP) PCT/EP2016/069753
Jun. 13, 2017 (EP) PCT/EP2017/064463

(51) Int. Cl. C12N 15/117; A61P 35/00; A61K 9/00; A61K 31/7088; A61K 39/395; A61K 38/20; A61K 38/17; A61K 39/39; A61K 39/00

(52) U.S. Cl. CPC C12N 15/117; C12N 2310/336; A61K 9/0019; A61K 31/7088; A61K 39/3955; A61K 38/208; A61K 38/177; A61K 39/39; A61K 39/0011; C12N 2320/32; C12N 2310/3513; C12N 2310/17; A61K 2039/53; A61K 2039/54; A61K 2039/55538; A61K 2039/572; A61K 2039/585; C12N 2310/334; A61P 35/00

(57) ABSTRACT

The present invention relates to RNA, particularly an immunostimulatory RNA (isRNA), a coding RNA or a combination thereof, for use in the treatment or prophylaxis of a disease, in particular a tumor and/or cancer disease. The present invention also provides pharmaceutical compositions, and a kit comprising the RNA(s). Further, the invention also comprises medical uses of the RNA(s) and compositions comprising the RNA(s).

[0001] The present invention relates to RNA, particularly an immunostimulatory RNA (isRNA), a coding RNA or a combination thereof, for use in the treatment or prophylaxis of a disease, in particular a tumor and/or cancer disease. The present invention also provides pharmaceutical compositions, and a kit comprising the RNA(s). Further, the invention also comprises medical uses of the RNA(s) and compositions comprising the RNA(s).

[0002] Cancer diseases, also known as malignant tumors, are a group of diseases involving abnormal cell growth with the potential to invade or spread to other parts of the body. In 2012, about 14.1 million new cases of cancer occurred globally (not including skin cancer other than melanoma).

[0003] The standard treatments of cancer include chemotherapy, radiation and surgery, or immunotherapy wherein these treatments are applied individually or in combination. Cancer immunotherapy which is focused on stimulating the immune system through vaccination, adoptive cellular immunotherapy, immune checkpoint blockade or other immunostimulants or immunomodulators to elicit an anti-tumor response.

[0004] Some approaches use gene therapy and genetic vaccination for treatment of cancer or other tumor diseases. Gene therapy and genetic vaccination are molecular medicine methods, which are based on the introduction of a nucleic acid into cells or into tissues of a patient. Subsequently the information encoded by the nucleic acid introduced is processed in the organism, i.e. resulting in expression of a therapeutic peptide or protein or in expression of an antigen, which is coded by the nucleic acid.

[0005] Conventional gene therapeutic methods, including gene therapy and genetic vaccination are based on the use of DNA molecules in order to transfer the desired genetic information into the cell. Various methods have been developed for introducing DNA into cells, such as calcium phosphate transfection, polybrene transfection, protoplast fusion, electroporation, microinjection and lipofection. DNA viruses may likewise be used as a DNA vehicle achieving a very high transfection rate. The use of DNA entails the risk of the DNA being inserted into an intact gene of the host cell's genome by e.g. recombination. In this case the affected gene may be mutated and inactivated or may give rise to misinformation. Another risk of using DNA as a pharmaceutical agent is the risk of inducing pathogenic anti-drug antibodies (anti-DNA antibodies) in the patient, which may result in autoimmune adverse effects.

[0006] The use of RNA as a gene therapeutic agent or genetic vaccine is substantially safer, because RNA does not involve the risk of being integrated into the genome inducing an undesired pathogenic induction of anti-drug antibodies.

[0007] Thus RNA expression systems have considerable advantages over DNA expression systems in gene therapy and in genetic vaccination although it has been assumed for a long time that the instability of mRNA or of RNA in general may pose a serious problem for medical methods based on RNA expression systems.

[0008] The instability of RNA is due, in particular, to RNA-degrading enzymes (ribonucleases—RNases). There are also many further processes that destabilize RNA, wherein interaction between the RNA and proteins often appears to play a crucial role. Some measures for increasing the stability of RNA have been proposed, thus enabling the use thereof as a gene therapy agent or RNA vaccine.

[0009] With respect to the ex vivo stability of RNA, European patent application EP 1 083 232 A1 describes a method for introducing RNA, in particular mRNA, into cells and organisms, wherein the RNA forms a complex with a cationic peptide or protein.

[0010] The application of mRNA for the treatment and/or prophylaxis of cancer is known. For example, international patent application WO 03/051401 A2 describes a pharmaceutical composition comprising at least one mRNA, which contains at least one region encoding an antigen from a tumor, combined with an aqueous solvent and preferably with a cytokine e.g. GM-CSF. The pharmaceutical composition is proposed for use in therapy and/or prophylaxis of cancer.

[0011] International patent application WO 2006/008154 A1 discloses an mRNA mixture for vaccination against tumor diseases, wherein at least one type of mRNA contains at least one tumor antigen-encoding region. At least one other mRNA contains at least one type of an immunogenic protein-coding region. Nevertheless there is still a need for an effective treatment of cancer or tumor diseases. Therefore it is the object of the underlying invention to provide an approach for effective treatment of tumor diseases wherein tumor tissue and cancer cells are specifically destroyed.

[0012] This object is solved by the subject-matter of the claims. Particularly, the object underlying the present invention is solved by isRNA, coding RNA or a combination thereof for use in the treatment or prophylaxis of tumor and/or cancer diseases. According to further aspects of the invention, the object is solved by a pharmaceutical composition, by a kit or kit of parts, and by a method of treatment of tumor or cancer diseases.

[0013] For the sake of clarity and readability the following definitions are provided. Any technical feature mentioned for these definitions may be read on each and every embodiment of the invention. Additional definitions and explanations may be specifically provided in the context of these embodiments.

[0014] Immune system: The immune system may protect organisms from infection. If a pathogen breaks through a physical barrier of an organism and enters this organism, the innate immune system provides an immediate, but non-specific response. If pathogens evade this innate response, vertebrates possess a second layer of protection, the adaptive immune system. Here, the immune system adapts its response during an infection to improve its recognition of the pathogen. Additionally to infections of pathogens this response can also be directed against malignant tumor cells of the body. The improved response is then retained after the pathogen or tumor cell has been eliminated, in the form of an immunological memory, and allows the adaptive immune system to mount faster and stronger attacks each time this pathogen is encountered. According to this, the immune system comprises the innate and the adaptive immune system. Each of these two parts contains so called humoral and cellular components.

[0015] Immune response: An immune response may typically either be a specific reaction of the adaptive immune system to an antigen, with antigens being tumor derived (so called specific or adaptive immune response) or an unspecific reaction of the innate immune system (so called unspecific or innate immune response).

[0016] Adaptive immune system: The adaptive immune system is composed of highly specialized, systemic cells and processes that eliminate or prevent pathogenic growth. The adaptive immune response provides the vertebrate immune system with the ability to recognize and remember specific pathogens (to generate immunity), and to mount stronger attacks each time the pathogen is encountered. The system is highly adaptable because of somatic hypermutation (a process of increased frequency of somatic mutations), and V(D)J recombination (an irreversible genetic recombination of antigen receptor gene segments). This mechanism allows a small number of genes to generate a vast number of different antigen receptors, which are then uniquely expressed on each individual lymphocyte. Because the gene rearrangement leads to an irreversible change in the DNA of each cell, all of the progeny (offspring) of that cell will then inherit genes encoding the same receptor specificity, including the Memory B cells and Memory T cells that are the keys to long-lived specific immunity. Immune network theory is a theory of how the adaptive immune system works, that is based on interactions between the variable regions of the receptors of T cells, B cells and of molecules made by T cells and B cells that have variable regions.

[0017] Adaptive immune response: The adaptive immune response is typically understood to be antigen-specific. Antigen specificity allows for the generation of responses that are tailored to specific antigens, pathogens or pathogen-infected cells. The ability to mount these tailored responses is maintained in the body by “memory cells”. Should a pathogen infect the body more than once, these specific memory cells are used to quickly eliminate it. In this context, the first step of an adaptive immune response is the activation of naïve antigen-specific T cells or different immune cells able to induce an antigen-specific immune response by antigen-presenting cells. This occurs in the lymphoid tissues and organs through which naïve T cells are constantly passing. Cell types that can serve as antigen-presenting cells are inter alia dendritic cells, macrophages, and B cells. Each of these cells has a distinct function in eliciting immune responses. Dendritic cells take up antigens by phagocytosis and macropinocytosis and are stimulated by contact with e.g. a foreign antigen to migrate to the local lymphoid tissue, where they differentiate into mature dendritic cells. Macrophages ingest particulate antigens such as bacteria and are induced by infectious agents or other appropriate stimuli to express MHC molecules. The unique ability of B cells to bind and internalize soluble protein antigens via their receptors may also be important to induce T cells. Presenting the antigen on MHC molecules leads to activation of T cells which induces their proliferation and differentiation into armed effector T cells. The most important function of effector T cells is the killing of infected cells by CD8+ cytotoxic T cells and the activation of macrophages by Th1 cells which together make up cell-mediated immunity, and the activation of B cells by both Th2 and Th1 cells to produce different classes of antibody, thus driving the humoral immune response. T cells recognize an antigen by their T cell receptors which do not recognize and bind antigen directly, but instead recognize short peptide fragments e.g. of pathogen-derived protein antigens, which are bound to MHC molecules on the surfaces of other cells.

[0018] Cellular immunity/cellular immune response: Cellular immunity relates typically to the activation of macrophages, natural killer cells (NK), antigen-specific cytotoxic T-lymphocytes, and the release of various cytokines in response to an antigen. In a more general way, cellular immunity is not related to antibodies but to the activation of cells of the immune system. A cellular immune response is characterized e.g. by activating antigen-specific cytotoxic T-lymphocytes that are able to induce apoptosis in body cells displaying epitopes of an antigen on their surface, such as virus-infected cells, cells with intracellular bacteria, and cancer cells displaying tumor antigens; activating macrophages and natural killer cells, enabling them to destroy pathogens; and stimulating cells to secrete a variety of cytokines that influence the function of other cells involved in adaptive immune responses and innate immune responses.

[0019] Humoral immunity/humoral immune response: Humoral immunity refers typically to antibody production and the accessory processes that may accompany it. A humoral immune response may be typically characterized, e.g., by Th2 activation and cytokine production, germinal center formation and isotype switching, affinity maturation and memory cell generation. Humoral immunity also typically may refer to the effector functions of antibodies, which include pathogen and toxin neutralization, classical complement activation, and opsonin promotion of phagocytosis and pathogen elimination.

[0020] Innate immune system: The innate immune system, also known as non-specific immune system, comprises the cells and mechanisms that defend the host from infection by other organisms in a non-specific manner. This means that the cells of the innate system recognize and respond to pathogens in a generic way, but unlike the adaptive immune system, it does not confer long-lasting or protective immunity to the host. The innate immune system may be e.g. activated by ligands of pathogen-associated molecular patterns (PAMP) receptors, e.g. Toll-like receptors (TLRs) or other auxiliary substances such as lipopolysaccharides, TNF-alpha, CD40 ligand, or cytokines, monokines, lymphokines, interleukins or chemokines, immunostimulatory nucleic acids, immunostimulatory RNA (isRNA), CpG-DNA, antibacterial agents, or anti-viral agents. Typically a response of the innate immune system includes recruiting immune cells to sites of infection, through the production of chemical factors, including specialized chemical mediators, called cytokines; activation of the complement cascade; identification and removal of foreign substances present in organs, tissues, the blood and lymph, by specialized white blood cells; activation of the adaptive immune system through a process known as antigen presentation; and/or acting as a physical and chemical barrier to infectious agents.

[0021] Adjuvant/adjuvant component: An adjuvant or an adjuvant component in the broadest sense is typically a (e.g. pharmacological or immunological) agent or composition that may modify, e.g. enhance, the efficacy of other agents, such as a drug or vaccine. Conventionally the term refers in the context of the invention to a compound or composition that serves as a carrier or auxiliary substance for immunogens and/or other pharmaceutically active compounds. It is to be interpreted in a broad sense and refers to a broad spectrum of substances that are able to increase the immunogenicity of antigens incorporated into or co-administered with an adjuvant in question. In the context of the present invention an adjuvant will preferably enhance the specific immunogenic effect of the active agents of the present invention. Typically, “adjuvant” or “adjuvant component” has the same meaning and can be used mutually. Adjuvants may be divided, e.g., into immuno potentiators, antigenic delivery systems or even combinations thereof. The term “adjuvant” is typically understood not to comprise agents which confer immunity by themselves. An adjuvant assists the immune system unspecifically to enhance the antigen-specific immune response by e.g. promoting presentation of an antigen to the immune system or induction of an unspecific innate immune response. Furthermore, an adjuvant may preferably e.g. modulate the antigen-specific immune response by e.g. shifting the dominating Th2-based antigen specific response to a more Th1-based antigen specific response or vice versa. Accordingly, an adjuvant may favourably modulate cytokine expression/secretion, antigen presentation, type of immune response etc.

[0022] Immunostimulatory/immunostimulating RNA: An immunostimulatory/immunostimulating RNA (isRNA) in the context of the invention may typically be an RNA that is capable of inducing an innate immune response by itself. It usually does not comprise an open reading frame and thus does not provide a peptide-antigen or immunogen but elicits an innate immune response e.g. by binding to a specific kind of Toll-like-receptor (TLR) or other suitable receptors. Therefore immunostimulatory/immunostimulating RNAs are preferably non-coding RNAs. However, of course also mRNAs having an open reading frame and encoding a peptide/protein (e.g. an antigenic function) may induce an innate immune response.

[0023] Antigen: The term “antigen” refers typically to a substance which may be recognized by the immune system and may be capable of triggering an antigen-specific immune response, e.g. by formation of antibodies or antigen-specific T-cells as part of an adaptive immune response. An antigen may be a protein or peptide. In this context, the first step of an adaptive immune response is the activation of naïve antigen-specific T cells by antigen-presenting cells. This occurs in the lymphoid tissues and organs through which naïve T cells are constantly passing. The three cell types that can serve as antigen-presenting cells are dendritic cells, macrophages, and B cells. Each of these cells has a distinct function in eliciting immune responses. Tissue dendritic cells take up antigens by phagocytosis and macropinocytosis and are stimulated by infection to migrate to the local lymphoid tissue, where they differentiate into mature dendritic cells. Macrophages ingest particulate antigens such as bacteria and are induced by infectious agents to express MHC class II molecules. The unique ability of B cells to bind and internalize soluble protein antigens via their receptors may be important to induce T cells. By presenting the antigen on MHC molecules leads to activation of T cells which induces their proliferation and differentiation into armed effector T cells. The most important function of effector T cells is the killing of infected cells by CD8+ cytotoxic T cells and the activation of macrophages by Th1 cells which together make up cell-mediated immunity, and the activation of B cells by both Th2 and Th1 cells to produce different classes of antibody, thus driving the humoral immune response. T cells recognize an antigen by their T cell receptors which does not recognize and bind antigen directly, but instead recognize short peptide fragments e.g. of pathogens' protein antigens, which are bound to MHC molecules on the surfaces of other cells.

[0024] T cells fall into two major classes that have different effector functions. The two classes are distinguished by the expression of the cell-surface proteins CD4 and CD8. These two types of T cells differ in the class of MHC molecule that they recognize. There are two classes of MHC molecules—MHC class I and MHC class II molecules—which differ in their structure and expression pattern on tissues of the body. CD4+ T cells bind to a MHC class II molecule and CD8+ T cells to a MHC class I molecule. MHC class I and MHC class II molecules have distinct distributions among cells that reflect the different effector functions of the T cells that recognize them. MHC class I molecules present peptides of cytosolic and nuclear origin e.g. from pathogens, commonly viruses, to CD8+ T cells, which differentiate into cytotoxic T cells that are specialized to kill any cell that they specifically recognize. Almost all cells express MHC class I molecules, although the level of constitutive expression varies from one cell type to the next. But not only pathogenic peptides from viruses are presented by MHC class I molecules, also self-antigens like tumor antigens are presented by them. MHC class I molecules bind peptides from proteins degraded in the cytosol and transported in the endoplasmic reticulum. The CD8+ T cells that recognize MHC class I:peptide complexes at the surface of infected cells are specialized to kill any cells displaying foreign peptides and so rid the body of cells infected with viruses and other cytosolic pathogens. The main function of CD4+ T cells (CD4+ helper T cells) that recognize MHC class II molecules is to activate other effector cells of the immune system. Thus MHC class II molecules are normally found on B lymphocytes, dendritic cells, and macrophages, cells that participate in immune responses, but not on other tissue cells. Macrophages, for example, are activated to kill the intravesicular pathogens they harbour, and B cells to secrete immunoglobulins against foreign molecules. MHC class II molecules are prevented from binding to peptides in the endoplasmic reticulum and thus MHC class II molecules bind peptides from proteins which are degraded in endosomes. They can capture peptides from pathogens that have entered the vesicular system of macrophages, or from antigens internalized by immature dendritic cells or the immunoglobulin receptors of B cells. Pathogens that accumulate in large numbers inside macrophage and dendritic cell vesicles tend to stimulate the differentiation of Th1 cells, whereas extracellular antigens tend to stimulate the production of Th2 cells. Th1 cells activate the microbicidal properties of macrophages and induce B cells to make IgG antibodies that are very effective of opsonising extracellular pathogens for ingestion by phagocytic cells, whereas Th2 cells initiate the humoral response by activating naïve B cells to secrete IgM, and induce the production of weakly opsonising antibodies such as IgG1 and IgG3 (mouse) and IgG2 and IgG4 (human) as well as IgA and IgE (mouse and human).

[0025] Epitope (also called “antigen determinant”): T cell epitopes may comprise fragments preferably having a length of about 6 to about 20 or even more amino acids, e.g. fragments as processed and presented by MHC class I molecules, preferably having a length of about 8 to about 10 amino acids, e.g. 8, 9, or 10, (or even 11, or 12 amino acids), or fragments as processed and presented by MHC class II molecules, preferably having a length of about 13 or more amino acids, e.g. 13, 14, 15, 16, 17, 18, 19, 20 or even more amino acids, wherein these fragments may be selected from any part of the amino acid sequence. These fragments are typically recognized by T cells in form of a complex consisting of the peptide fragment and an MHC molecule. B cell epitopes are typically fragments located on the outer surface of (native) protein or peptide antigens.

[0026] Vaccine: A vaccine is typically understood to be a composition comprising a compound derived from an antigenic substance, which is preferably derived from the causative agent of a disease, wherein the compound is used to provide immunity against one or several diseases. In the context of the present invention, the term “vaccine” may preferably also refer to a (synthetic/artificial) compound, which is not derived from an antigenic substance from the causative agent of a disease, and wherein the compound is used to provide immunity against one or several diseases. For example, the term “vaccine” as used herein may refer to a composition comprising as an active ingredient a (synthetic/artificial) compound, such as an (artificial) nucleic acid molecule, peptide or protein (which are preferably not derived from an antigenic substance derived from the causative agent of a disease), wherein said compound induces an immune response, preferably an innate immune response. In this context, a vaccine may comprise as an active ingredient a (synthetic/artificial) compound that preferably acts as an adjuvant and/or an immune modulator.

[0027] In this context, the term “immune modulator” refers to a compound, which enhances or inhibits an immune reaction, for instance by specific interference with a signalling pathway in certain immune cells. In the meaning of the present invention, a vaccine may thus stimulate the body's adaptive and/or innate immune system in order to provide an immune response, for example an immune response against a tumor (cell).

[0028] Antigen-providing mRNA: An antigen-providing mRNA may typically be an mRNA, having at least one open reading frame that can be translated by a cell or an organism provided with that mRNA. The product of this translation is a peptide or protein that may act as an antigen, preferably as an immunogen. The product may also be a fusion protein composed of more than one immunogen, e.g. a fusion protein that consist of two or more epitopes, peptides or proteins, wherein the epitopes, peptides or proteins may be linked by linker sequences.

[0029] Bi-/multicistronic mRNA: An bi-/multicistronic mRNA typically may have two (bicistronic) or more (multicistronic) coding sequences (cds) (also often referred to as open reading frames (ORF)). A coding sequence/an open reading frame in this context is a sequence of several nucleotide triplets (codons) that can be translated into a peptide or protein.

[0030] Translation of such an mRNA yields two (bicistronic) or more (multicistronic) distinct translation products (provided the coding sequences/ORFs are not identical). For expression in eukaryotes such mRNAs may for example comprise an internal ribosomal entry site (IRES) sequence.

[0031] 5′-CAP-Structure: A 5′-CAP is typically a modified nucleotide (CAP analogue), particularly a guanine nucleotide, added to the 5′ end of an mRNA molecule. Preferably, the 5′-CAP is added using a 5′-5′-triphosphate linkage (also named m7GpppN). Further examples of 5′-CAP structures include glyceryl, inverted deoxy abasic residue (moiety), 4′,5′ methylene nucleotide, 1-(beta-D-erythrofuranosyl) nucleotide, 4′-thio nucleotide, carbocyclic nucleotide, 1,5-anhydrohexitol nucleotide, L-nucleotides, alpha-nucleotide, modified base nucleotide, threo-pentofuranosyl nucleotide, acyclic 3′,4′-seco nucleotide, acyclic 3,4-dihydroxybutyl nucleotide, acyclic 3,5 dihydroxypentyl nucleotide, 3′-3′-inverted nucleotide moiety, 3′-3′-inverted abasic moiety, 3′-2′-inverted nucleotide moiety, 3′-2′-inverted abasic moiety, 1,4-butanediol phosphate, 3′-phosphoramidate, hexylphosphate, aminohexyl phosphate, 3′-phosphate, 3′phosphorothioate, phosphorodithioate, or bridging or non-bridging methylphosphonate moiety. These modified 5′-CAP structures may be used in the context of the present invention to modify the mRNA sequence of the inventive composition. Further modified 5′-CAP structures which may be used in the context of the present invention are CAP1 (additional methylation of the ribose of the adjacent nucleotide of m7GpppN), CAP2 (additional methylation of the ribose of the 2nd nucleotide downstream of the m7GpppN), CAP3 (additional methylation of the ribose of the 3rd nucleotide downstream of the m7GpppN), CAP4 (additional methylation of the ribose of the 4th nucleotide downstream of the m7GpppN), ARCA (anti-reverse CAP analogue), modified ARCA (e.g. phosphothioate modified ARCA), inosine, N1-methyl-guanosine, 2′-fluoro-guanosine, 7-deaza-guanosine, 8-oxo-guanosine, 2-amino-guanosine, LNA-guanosine, and 2-azido-guanosine.

[0032] In the context of the present invention, a 5′ cap structure may also be formed in chemical RNA synthesis or RNA in vitro transcription (co-transcriptional capping) using cap analogues, or a cap structure may be formed in vitro using capping enzymes (e.g., commercially available capping kits)

[0033] Cap analogue: A cap analogue refers to a non-polymerizable di-nucleotide that has cap functionality in that it facilitates translation or localization, and/or prevents degradation of the RNA molecule when incorporated at the 5′ end of the RNA molecule. Non-polymerizable means that the cap analogue will be incorporated only at the 5′terminus because it does not have a 5′ triphosphate and therefore cannot be extended in the 3′ direction by a template-dependent RNA polymerase.

[0034] Cap analogues include, but are not limited to, a chemical structure selected from the group consisting of m7GpppG, m7GpppA, m7GpppC; unmethylated cap analogues (e.g., GpppG); dimethylated cap analogue (e.g., m2,7GpppG), trimethylated cap analogue (e.g., m2,2,7GpppG), dimethylated symmetrical cap analogues (e.g., m7Gpppm7G), or anti reverse cap analogues (e.g., ARCA; m7,2′OmeGpppG, m7,2′dGpppG, m7,3′OmeGpppG, m7,3′dGpppG and their tetraphosphate derivatives) (Stepinski et al., 2001. RNA 7(10):1486-95).

[0035] Further cap analogues have been described previously (U.S. Pat. No. 7,074,596, WO 2008/016473, WO 2008/157688, WO 2009/149253, WO 2011/015347, and WO 2013/059475). The synthesis of N⁷-(4-chlorophenoxyethyl) substituted dinucleotide cap analogues has been described recently (Kore et al. (2013) Bioorg. Med. Chem. 21(15): 4570-4).

[0036] Fragments of proteins: “Fragments” of proteins or peptides in the context of the present invention may, typically, comprise a sequence of a protein or peptide as defined herein, which is, with regard to its amino acid sequence (or its encoded nucleic acid molecule), N-terminally and/or C-terminally truncated compared to the amino acid sequence of the original (native) protein (or its encoded nucleic acid molecule). Such truncation may thus occur either on the amino acid level or correspondingly on the nucleic acid level. A sequence identity with respect to such a fragment as defined herein may therefore preferably refer to the entire protein or peptide as defined herein or to the entire (coding) nucleic acid molecule of such a protein or peptide. In the context of antigens such fragment may have a length of about 6 to about 20 or even more amino acids, e.g. fragments as processed and presented by MHC class I molecules, preferably having a length of about 8 to about 10 amino acids, e.g. 8, 9, or 10, (or even 6, 7, 11, or 12 amino acids), or fragments as processed and presented by MHC class II molecules, preferably having a length of about 13 or more amino acids, e.g. 13, 14, 15, 16, 17, 18, 19, 20 or even more amino acids, wherein these fragments may be selected from any part of the amino acid sequence. These fragments are typically recognized by T-cells in form of a complex consisting of the peptide fragment and an MHC molecule, i.e. the fragments are typically not recognized in their native form. Fragments of proteins or peptides (e.g. in the context of antigens) may comprise at least one epitope of those proteins or peptides. Furthermore also domains of a protein, like the extracellular domain, the intracellular domain or the transmembrane domain and shortened or truncated versions of a protein may be understood to comprise a fragment of a protein. Preferably, a fragment of a protein comprises a functional fragment of the protein, which means that the fragment exerts the same effect or functionality as the whole protein it is derived from. More preferably, a “fragment” as used herein is at least 50%, 60%, 70%, 75%, 80%, 81%, 82%, 83%, 84%, 85%, 86%, 87%, 88%, 89%, 90%, 91%, 92%, 93%, 94%, 95%, 96%, 97%, 98%, or 99% identical to the peptide or protein, from which it is derived.

[0037] Variants of proteins: “Variants” of proteins or peptides as defined in the context of the present invention may be generated, having an amino acid sequence which differs from the original sequence in one or more mutation(s), such as one or more substituted, inserted and/or deleted amino acid(s). Preferably, these fragments and/or variants have the same biological function or specific activity compared to the full-length native protein, e.g. its specific antigenic property. “Variants” of proteins or peptides as defined in the context of the present invention may comprise conservative amino acid substitution(s) compared to their native, i.e. non-mutated physiological, sequence. Those amino acid sequences as well as their encoding nucleotide sequences in particular fall under the term variants as defined herein. Substitutions in which amino acids, which originate from the same class, are exchanged for one another are called conservative substitutions. In particular, these are amino acids having aliphatic side chains, positively or negatively charged side chains, aromatic groups in the side chains or amino acids, the side chains of which can enter into hydrogen bridges, e.g. side chains which have a hydroxyl function. This means that e.g. an amino acid having a polar side chain is replaced by another amino acid having a likewise polar side chain, or, for example, an amino acid characterized by a hydrophobic side chain is substituted by another amino acid having a likewise hydrophobic side chain (e.g. serine (threonine) by threonine (serine) or leucine (isoleucine) by isoleucine (leucine)). Insertions and substitutions are possible, in particular, at those sequence positions which cause no modification to the three-dimensional structure or do not affect the binding region. Modifications to a three-dimensional structure by insertion(s) or deletion(s) can easily be determined e.g. using CD spectra (circular dichroism spectra) (Urry, 1985, Absorption, Circular Dichroism and ORD of Polypeptides, in: Modern Physical Methods in Biochemistry, Neuberger et al. (ed.), Elsevier, Amsterdam).

[0038] A “variant” of a protein or peptide may have at least 70%, 75%, 80%, 85%, 90%, 95%, 98% or 99% amino acid identity over a stretch of 10, 20, 30, 50, 75 or 100 amino acids of such protein or peptide. Alternatively, More preferably, a “variant” as used herein is at least 50%, 60%, 70%, 75%, 80%, 81%, 82%, 83%, 84%, 85%, 86%, 87%, 88%, 89%, 90%, 91%, 92%, 93%, 94%, 95%, 96%, 97%, 98%, or 99% identical to the peptide or protein, from which it is derived.

[0039] Furthermore, variants of proteins or peptides as defined herein, which may be encoded by a nucleic acid molecule, may also comprise those sequences, wherein nucleotides of the encoding nucleic acid sequence are exchanged according to the degeneration of the genetic code, without leading to an alteration of the respective amino acid sequence of the protein or peptide, i.e. the amino acid sequence or at least part thereof may not differ from the original sequence within the above meaning.

[0040] Preferably, a variant of a protein comprises a functional variant of the protein, which means that the variant exerts the same effect or functionality as the protein it is derived from.

[0041] Identity of a sequence: In order to determine the percentage to which two sequences are identical, e.g. nucleic acid sequences or amino acid sequences as defined herein, preferably the amino acid sequences encoded by a nucleic acid sequence of the polymeric carrier as defined herein or the amino acid sequences themselves, the sequences can be aligned in order to be subsequently compared to one another. Therefore, e.g. a position of a first sequence may be compared with the corresponding position of the second sequence. If a position in the first sequence is occupied by the same component (residue) as is the case at a position in the second sequence, the two sequences are identical at this position. If this is not the case, the sequences differ at this position. If insertions occur in the second sequence in comparison to the first sequence, gaps can be inserted into the first sequence to allow a further alignment. If deletions occur in the second sequence in comparison to the first sequence, gaps can be inserted into the second sequence to allow a further alignment. The percentage to which two sequences are identical is then a function of the number of identical positions divided by the total number of positions including those positions which are only occupied in one sequence. The percentage to which two sequences are identical can be determined using a mathematical algorithm. A preferred, but not limiting, example of a mathematical algorithm which can be used is the algorithm of Karlin et al. (1993), PNAS USA, 90:5873-5877 or Altschul et al. (1997), Nucleic Acids Res., 25:3389-3402. Such an algorithm is integrated in the BLAST program. Sequences which are identical to the sequences of the present invention to a certain extent can be identified by this program.

[0042] Monocistronic mRNA: A monocistronic mRNA may typically be an mRNA, that comprises only one coding sequence (open reading frame). A coding sequence/open reading frame in this context is a sequence of several nucleotide triplets (codons) that can be translated into a peptide or protein.

[0043] Nucleic acid: The term nucleic acid means any DNA or RNA molecule and is used synonymous with polynucleotide. Wherever herein reference is made to a nucleic acid or nucleic acid sequence encoding a particular protein and/or peptide, said nucleic acid or nucleic acid sequence, respectively, preferably also comprises regulatory sequences allowing in a suitable host, e.g. a human being, its expression, i.e. transcription and/or translation of the nucleic acid sequence encoding the particular protein or peptide.

[0044] Peptide: A peptide is a polymer of amino acid monomers. Usually the monomers are linked by peptide bonds. The term “peptide” does not limit the length of the polymer chain of amino acids. In some embodiments of the present invention a peptide may for example contain less than 50 monomer units. Longer peptides are also called polypeptides, typically having 50 to 600 monomeric units, more specifically 50 to 300 monomeric units.

[0045] Pharmaceutically effective amount: A pharmaceutically effective amount in the context of the invention is typically understood to be an amount that is sufficient to induce an immune response or to trigger the desired therapeutical effect.

[0046] Protein: A protein typically consists of one or more peptides and/or polypeptides folded into 3-dimensional form, facilitating a biological function.

[0047] Poly(C) sequence: A poly(C) sequence is typically a long sequence of cytosine nucleotides, typically about 10 to about 200 cytosine nucleotides, preferably about 10 to about 100 cytosine nucleotides, more preferably about 10 to about 70 cytosine nucleotides or even more, preferably about 20 to about 50, or even about 20 to about 30 cytosine nucleotides. A poly(C) sequence may preferably be located 3′ of the coding region comprised by a nucleic acid.

[0048] Poly(A) tail: A poly(A) tail also called “3′-poly(A) tail” or “poly(A) sequence” is typically a long homopolymeric sequence of adenosine nucleotides of up to about 400 adenosine nucleotides, e.g. from about 25 to about 400, preferably from about 50 to about 400, more preferably from about 50 to about 300, even more preferably from about 50 to about 250, most preferably from about 60 to about 250 adenosine nucleotides, added to the 3′ end of an mRNA. In the context of the present invention, the poly(A) tail of an mRNA is preferably derived from a DNA template by RNA in vitro transcription. Alternatively, the poly(A) sequence may also be obtained in vitro by common methods of chemical synthesis without being necessarily transcribed from a DNA-progenitor. Moreover, poly(A) sequences, or poly(A) tails may be generated by enzymatic polyadenylation of the RNA.

[0049] Stabilized nucleic acid: A stabilized nucleic acid, typically, exhibits a modification increasing resistance to in vivo degradation (e.g. degradation by an exo- or endo-nuclease) and/or ex vivo degradation (e.g. by the manufacturing process prior to vaccine administration, e.g. in the course of the preparation of the vaccine solution to be administered). Stabilization of RNA can, e.g., be achieved by providing a 5′-CAP-Structure, a poly(A) tail, or any other UTR-modification. It can also be achieved by backbone-modification or modification of the G/C-content or the C-content of the nucleic acid. Various other methods are known in the art and conceivable in the context of the invention.

[0050] Carrier/polymeric carrier: A carrier in the context of the invention may typically be a compound that facilitates transport and/or complexation of another compound. Said carrier may form a complex with said other compound. A polymeric carrier is a carrier that is formed of a polymer.

[0051] Cationic component: The term “cationic component” typically refers to a charged molecule, which is positively charged (cation) at a pH value of typically about 1 to 9, preferably of a pH value of or below 9 (e.g. 5 to 9), of or below 8 (e.g. 5 to 8), of or below 7 (e.g. 5 to 7), most preferably at physiological pH values, e.g. about 7.3 to 7.4. Accordingly, a cationic peptide, protein or polymer according to the present invention is positively charged under physiological conditions, particularly under physiological salt conditions of the cell in vivo. A cationic peptide or protein preferably contains a larger number of cationic amino acids, e.g. a larger number of Arg, His, Lys or Orn than other amino acid residues (in particular more cationic amino acids than anionic amino acid residues like Asp or Glu) or contains blocks predominantly formed by cationic amino acid residues. The definition “cationic” may also refer to “polycationic” components.

[0052] Vehicle: A vehicle is an agent, e.g. a carrier, that may typically be used within a pharmaceutical composition or vaccine for facilitating administering of the components of the pharmaceutical composition or vaccine to an individual.

[0053] 3′-untranslated region (3′-UTR): A 3′-UTR is typically the part of an mRNA which is located between the protein coding region (i.e. the open reading frame) and the poly(A) sequence of the mRNA. A 3′-UTR of the mRNA is not translated into an amino acid sequence. The 3′-UTR sequence is generally encoded by the gene which is transcribed into the respective mRNA during the gene expression process. The genomic sequence is first transcribed into pre-mature mRNA, which comprises optional introns. The pre-mature mRNA is then further processed into mature mRNA in a maturation process. This maturation process comprises the steps of 5′-capping, splicing the pre-mature mRNA to excise optional introns and modifications of the 3′-end, such as polyadenylation of the 3′-end of the pre-mature mRNA and optional endo- or exonuclease cleavages etc. In the context of the present invention, a 3′-UTR corresponds to the sequence of a mature mRNA which is located 3′ to the stop codon of the protein coding region, preferably immediately 3′ to the stop codon of the protein coding region, and which extends to the 5′-side of the poly(A) sequence, preferably to the nucleotide immediately 5′ to the poly(A) sequence. The term “corresponds to” means that the 3′-UTR sequence may be an RNA sequence, such as in the mRNA sequence used for defining the 3′-UTR sequence, or a DNA sequence which corresponds to such RNA sequence. In the context of the present invention, the term “a 3′-UTR of a gene”, such as “a 3′-UTR of an albumin gene”, is the sequence which corresponds to the 3′-UTR of the mature mRNA derived from this gene, i.e. the mRNA obtained by transcription of the gene and maturation of the pre-mature mRNA. The term “3′-UTR of a gene” encompasses the DNA sequence and the RNA sequence of the 3′-UTR.

[0054] 5′-untranslated region (5′-UTR): A 5′-UTR is typically understood to be a particular section of messenger RNA (mRNA). It is located 5′ of the open reading frame of the mRNA. Typically, the 5′-UTR starts with the transcriptional start site and ends one nucleotide before the start codon of the open reading frame. The 5′-UTR may comprise elements for controlling gene expression, also called regulatory elements. Such regulatory elements may be, for example, ribosomal binding sites or a 5′-Terminal Oligopyrimidine Tract. The 5′-UTR may be posttranscriptionally modified, for example by addition of a 5′-CAP. In the context of the present invention, a 5′UTR corresponds to the sequence of a mature mRNA which is located between the 5′-CAP and the start codon. Preferably, the 5′-UTR corresponds to the sequence which extends from a nucleotide located 3′ to the 5′-CAP, preferably from the nucleotide located immediately 3′ to the 5′-CAP, to a nucleotide located 5′ to the start codon of the protein coding region, preferably to the nucleotide located immediately 5′ to the start codon of the protein coding region. The nucleotide located immediately 3′ to the 5′-CAP of a mature mRNA typically corresponds to the transcriptional start site. The term “corresponds to” means that the 5′-UTR sequence may be an RNA sequence, such as in the mRNA sequence used for defining the 5′-UTR sequence, or a DNA sequence which corresponds to such RNA sequence. In the context of the present invention, the term “a 5′-UTR of a gene”, such as “a 5′-UTR of a TOP gene”, is the sequence which corresponds to the 5′-UTR of the mature mRNA derived from this gene, i.e. the mRNA obtained by transcription of the gene and maturation of the pre-mature mRNA. The term “5′-UTR of a gene” encompasses the DNA sequence and the RNA sequence of the 5′-UTR.

[0055] 5′ Terminal Oligopyrimidine Tract (TOP): The 5′ terminal oligopyrimidine tract (TOP) is typically a stretch of pyrimidine nucleotides located at the 5′ terminal region of a nucleic acid molecule, such as the 5′ terminal region of certain mRNA molecules or the 5′ terminal region of a functional entity, e.g. the transcribed region, of certain genes. The sequence starts with a cytidine, which usually corresponds to the transcriptional start site, and is followed by a stretch of usually about 3 to 30 pyrimidine nucleotides. For example, the TOP may comprise 3, 4, 5, 6, 7, 8, 9, 10, 11, 12, 13, 14, 15, 16, 17, 18, 19, 20, 21, 22, 23, 24, 25, 26, 27, 28, 29, 30 or even more nucleotides. The pyrimidine stretch and thus the 5′ TOP ends one nucleotide 5′ to the first purine nucleotide located downstream of the TOP. mRNA that contains a 5′ terminal oligopyrimidine tract is often referred to as TOP mRNA. Accordingly, genes that provide such messenger RNAs are referred to as TOP genes. TOP sequences have, for example, been found in genes and mRNAs encoding peptide elongation factors and ribosomal proteins.

[0056] TOP motif: In the context of the present invention, a TOP motif is a nucleic acid sequence which corresponds to a 5′ TOP as defined above. Thus, a TOP motif in the context of the present invention is preferably a stretch of pyrimidine nucleotides having a length of 3-30 nucleotides. Preferably, the TOP-motif consists of at least 3 pyrimidine nucleotides, preferably at least 4 pyrimidine nucleotides, preferably at least 5 pyrimidine nucleotides, more preferably at least 6 nucleotides, more preferably at least 7 nucleotides, most preferably at least 8 pyrimidine nucleotides, wherein the stretch of pyrimidine nucleotides preferably starts at its 5′ end with a cytosine nucleotide. In TOP genes and TOP mRNAs, the TOP-motif preferably starts at its 5′ end with the transcriptional start site and ends one nucleotide 5′ to the first purine residue in said gene or mRNA. A TOP motif in the sense of the present invention is preferably located at the 5′end of a sequence which represents a 5′-UTR or at the 5′ end of a sequence which codes for a 5′-UTR. Thus, preferably, a stretch of 3 or more pyrimidine nucleotides is called “TOP motif” in the sense of the present invention if this stretch is located at the 5′ end of a respective sequence, such as the inventive mRNA, the 5′-UTR element of the inventive mRNA, or the nucleic acid sequence which is derived from the 5′-UTR of a TOP gene as described herein. In other words, a stretch of 3 or more pyrimidine nucleotides which is not located at the 5′-end of a 5′-UTR or a 5′-UTR element but anywhere within a 5′-UTR or a 5′-UTR element is preferably not referred to as “TOP motif”.

[0057] TOP gene: TOP genes are typically characterised by the presence of a 5′ terminal oligopyrimidine tract. Furthermore, most TOP genes are characterized by a growth-associated translational regulation. However, also TOP genes with a tissue specific translational regulation are known. As defined above, the 5′-UTR of a TOP gene corresponds to the sequence of a 5′-UTR of a mature mRNA derived from a TOP gene, which preferably extends from the nucleotide located 3′ to the 5′-CAP to the nucleotide located 5′ to the start codon. A 5′-UTR of a TOP gene typically does not comprise any start codons, preferably no upstream AUGs (uAUGs) or upstream open reading frames (uORFs). Therein, upstream AUGs and upstream open reading frames are typically understood to be AUGs and open reading frames that occur 5′ of the start codon (AUG) of the open reading frame that should be translated. The 5′-UTRs of TOP genes are generally rather short. The lengths of 5′-UTRs of TOP genes may vary between 20 nucleotides up to 500 nucleotides, and are typically less than about 200 nucleotides, preferably less than about 150 nucleotides, more preferably less than about 100 nucleotides. Exemplary 5′-UTRs of TOP genes in the sense of the present invention are the nucleic acid sequences extending from the nucleotide at position 5 to the nucleotide located immediately 5′ to the start codon (e.g. the ATG) in the sequences according to SEQ ID NOs. 1-1363, SEQ ID NO: 1395, SEQ ID NO: 1421 and SEQ ID NO: 1422 of the international patent application WO2013/143700 or homologs or variants thereof, whose disclosure is incorporated herewith by reference. In this context a particularly preferred fragment of a 5′UTR of a TOP gene is a 5′-UTR of a TOP gene lacking the 5′ TOP motif. The term ‘5′UTR of a TOP gene’ preferably refers to the 5′-UTR of a naturally occurring TOP gene.

[0058] Chemical synthesis of RNA: Chemical synthesis of relatively short fragments of oligonucleotides with defined chemical structure provides a rapid and inexpensive access to custom-made oligonucleotides of any desired sequence. Whereas enzymes synthesize DNA and RNA only in the 5′ to 3′ direction, chemical oligonucleotide synthesis does not have this limitation, although it is most often carried out in the opposite, i.e. the 3′ to 5′ direction. Currently, the process is implemented as solid-phase synthesis using the phosphoramidite method and phosphoramidite building blocks derived from protected nucleosides (A, C, G, and U), or chemically modified nucleosides.

[0059] To obtain the desired oligonucleotide, the building blocks are sequentially coupled to the growing oligonucleotide chain on a solid phase in the order required by the sequence of the product in a fully automated process. Upon the completion of the chain assembly, the product is released from the solid phase to the solution, deprotected, and collected. The occurrence of side reactions sets practical limits for the length of synthetic oligonucleotides (up to about 200 nucleotide residues), because the number of errors increases with the length of the oligonucleotide being synthesized. Products are often isolated by HPLC to obtain the desired oligonucleotides in high purity.

[0060] Chemically synthesized oligonucleotides find a variety of applications in molecular biology and medicine. They are most commonly used as antisense oligonucleotides, small interfering RNA, primers for DNA sequencing and amplification, probes for detecting complementary DNA or RNA via molecular hybridization, tools for the targeted introduction of mutations and restriction sites, and for the synthesis of artificial genes.

[0061] RNA in vitro transcription: The terms “RNA in vitro transcription” or “in vitro transcription” relate to a process wherein RNA is synthesized in a cell-free system (in vitro). DNA, particularly plasmid DNA, is used as template for the generation of RNA transcripts. RNA may be obtained by DNA-dependent in vitro transcription of an appropriate DNA template, which according to the present invention is preferably a linearized plasmid DNA template. The promoter for controlling in vitro transcription can be any promoter for any DNA-dependent RNA polymerase. Particular examples of DNA-dependent RNA polymerases are the T7, T3, and SP6 RNA polymerases. A DNA template for in vitro RNA transcription may be obtained by cloning of a nucleic acid, in particular cDNA corresponding to the respective RNA to be in vitro transcribed, and introducing it into an appropriate vector for in vitro transcription, for example into plasmid DNA. In a preferred embodiment of the present invention the DNA template is linearized with a suitable restriction enzyme, before it is transcribed in vitro. The cDNA may be obtained by reverse transcription of mRNA or chemical synthesis. Moreover, the DNA template for in vitro RNA synthesis may also be obtained by gene synthesis.

[0062] Methods for in vitro transcription are known in the art (see, e.g., Geall et al. (2013) Semin. Immunol. 25(2): 152-159; Brunelle et al. (2013) Methods Enzymol. 530:101-14). Reagents used in said method typically include:

[0063] 1) a linearized DNA template with a promoter sequence that has a high binding affinity for its respective RNA polymerase such as bacteriophage-encoded RNA polymerases;

[0064] 2) ribonucleoside triphosphates (NTPs) for the four bases (adenine, cytosine, guanine and uracil);

[0065] 3) optionally a cap analogue as defined above (e.g. m7G(5′ppp(5′)G (m7G));

[0066] 4) a DNA-dependent RNA polymerase capable of binding to the promoter sequence within the linearized DNA template (e.g. T7, T3 or SP6 RNA polymerase);

[0067] 5) optionally a ribonuclease (RNase) inhibitor to inactivate any contaminating RNase;

[0068] 6) optionally a pyrophosphatase to degrade pyrophosphate, which may inhibit transcription;

[0069] 7) MgCl₂, which supplies Mg²⁺ ions as a co-factor for the polymerase;

[0070] 8) a buffer to maintain a suitable pH value, which can also contain antioxidants (e.g. DTT), and/or polyamines such as spermidine at optimal concentrations.

[0071] RNA, mRNA: RNA is the usual abbreviation for ribonucleic acid. It is a nucleic acid molecule, i.e. a polymer consisting of nucleotide monomers. These nucleotides are usually adenosine monophosphate (AMP), uridine monophosphate (UMP), guanosine monophosphate (GMP) and cytidine monophosphate (CMP) monomers or analogues thereof, which are connected to each other along a so-called backbone. The backbone is formed by phosphodiester bonds between the sugar, i.e. ribose, of a first and a phosphate moiety of a second, adjacent monomer. The specific order of the monomers, i.e. the order of the bases linked to the sugar/phosphate-backbone, is called the RNA sequence. Usually RNA may be obtainable by transcription of a DNA sequence, e.g., inside a cell. In eukaryotic cells, transcription is typically performed inside the nucleus or the mitochondria. In vivo, transcription of DNA usually results in the so-called premature RNA (also called pre-mRNA, precursor mRNA or heterogeneous nuclear RNA) which has to be processed into so-called messenger RNA, usually abbreviated as mRNA. Processing of the premature RNA, e.g. in eukaryotic organisms, comprises a variety of different posttranscriptional modifications such as splicing, 5′-capping, polyadenylation, export from the nucleus or the mitochondria and the like. The sum of these processes is also called maturation of RNA. The mature messenger RNA usually provides the nucleotide sequence that may be translated into an amino acid sequence of a particular peptide or protein. Typically, a mature mRNA comprises a 5′-cap, optionally a 5′UTR, an open reading frame, optionally a 3′UTR and a poly(A) tail.

[0072] In addition to messenger RNA, several non-coding types of RNA exist which may be involved in regulation of transcription and/or translation, and immunostimulation. Within the present invention the term “RNA” further encompasses any type of single stranded (ssRNA) or double stranded RNA (dsRNA) molecule known in the art, such as viral RNA, retroviral RNA and replicon RNA, small interfering RNA (siRNA), antisense RNA (asRNA), circular RNA (circRNA), ribozymes, aptamers, riboswitches, immunostimulating/immunostimulatory RNA, transfer RNA (tRNA), ribosomal RNA (rRNA), small nuclear RNA (snRNA), small nucleolar RNA (snoRNA), microRNA (miRNA), and Piwi-interacting RNA (piRNA).

[0073] Fragment of a nucleic acid sequence, particularly an RNA: A fragment of a nucleic acid sequence consists of a continuous stretch of nucleotides corresponding to a continuous stretch of nucleotides in the full-length nucleic acid sequence which is the basis for the nucleic acid sequence of the fragment, which represents at least 20%, preferably at least 30%, more preferably at least 40%, more preferably at least 50%, even more preferably at least 60%, even more preferably at least 70%, even more preferably at least 80%, even more preferably at least 80%, even more preferably at least 85%, even more preferably at least 90%, even more preferably at least 95%, and most preferably at least 98% or 99% of the full-length nucleic acid sequence. Such a fragment, in the sense of the present invention, is preferably a functional fragment of the full-length nucleic acid sequence.

[0074] Variant of a nucleic acid sequence, particularly an RNA: A variant of a nucleic acid sequence refers to a variant of nucleic acid sequences which forms the basis of a nucleic acid sequence. For example, a variant nucleic acid sequence may exhibit one or more nucleotide deletions, insertions, additions and/or substitutions compared to the nucleic acid sequence from which the variant is derived. Preferably, a variant of a nucleic acid sequence is at least 40%, preferably at least 50%, more preferably at least 60%, more preferably at least 70%, even more preferably at least 80%, even more preferably at least 90%, most preferably at least 95% identical to the nucleic acid sequence the variant is derived from. Preferably, the variant is a functional variant. A “variant” of a nucleic acid sequence may have at least 70%, 75%, 80%, 85%, 90%, 95%, 98% or 99% nucleotide identity over a stretch of 10, 20, 30, 50, 75 or 100 nucleotide of such nucleic acid sequence.

[0075] Intratumoral administration/application: The term “intratumoral administration/application” refers to the direct delivery of a pharmaceutical composition into or adjacent to a tumor or cancer and/or immediate vicinity of a tumor or cancer. In the context of the present invention the term “intratumoral administration/application” thus typically also refers to locoregional or peritumoral application/administration. Multiple injections into separate regions of the tumor or cancer are also included. Furthermore, intratumoral administration/application includes delivery of a pharmaceutical composition into one or more metastases. Methods for intratumoral delivery of drugs are known in the art (Brincker, 1993. Crit. Rev. Oncol. Hematol. 15(2):91-8; Celikoglu et al., 2008. Cancer Therapy 6, 545-552). For example, the pharmaceutical composition can be administered by conventional needle injection, needle-free jet injection or electroporation or combinations thereof into the tumor or cancer tissue. The pharmaceutical composition can be injected directly into the tumor or cancer (tissue) with great precision by imaging-guided injection, preferably using an imaging technique, such as computer tomograpy, ultrasound, gamma camera imaging, positron emission tomography, or magnetic resonance tumor imaging. Further procedures are selected from the group including, but not limited to, direct intratumoral injection by endoscopy, bronchoscopy, cystoscopy, colonoscopy, laparoscope and catheterization. In addition the pharmaceutical composition can be injected locoregionally or peritumorally by the same methods. Tumor or cancer tissue includes metastases of the primary tumor, e.g. to lymph nodes, skin, soft tissues, bone, visceral organs or other organs of the body.

[0076] Decoy receptors: Decoy receptors recognize certain growth factors or cytokines with high affinity and specificity, but are structurally incapable of signaling or presenting the agonist to signaling receptor complexes. They act as a molecular trap for the agonist and for signaling receptor components. A decoy receptor, or sink receptor, is a receptor that binds a ligand, inhibiting it from binding to its normal receptor. For instance, the receptor VEGFR-1 can prevent vascular endothelial growth factor (VEGF) from binding to the VEGFR-2.

[0077] Dominant negative receptors: Dominant negative receptors are variants of the particular receptor comprising dominant-negative (DN) mutations as leading to mutant polypeptides that disrupt the activity of the wild type receptor when overexpressed. In a first aspect, the invention relates to an immunostimulatory RNA (isRNA) for use in the treatment or prophylaxis of tumor and/or cancer diseases. In particular, an isRNA is provided for use in the treatment or prophylaxis of tumor and/or cancer diseases, wherein the isRNA is administered intratumorally.

[0078] The inventors found that the administration, in particular the intratumoral administration, of an isRNA as described herein may be employed for treatment or prophylaxis of tumor or cancer diseases and related disorders. It has been shown that treatment of tumor or cancer diseases with isRNA is surprisingly effective, in particular if administered intratumorally, in decreasing tumor size. Moreover, the application of isRNA according to the invention was able to increase survival in animal models and to protect surviving animals from rechallenge with the same tumor although treatment with the pharmaceutical composition had been stopped upon rechallenge. This finding is in line with generation of long lasting immunologic memory to the tumor. This could not have been expected as the isRNA does not induce an adaptive immune response directly.

[0079] As used herein, the terms “tumor”, “cancer” or “cancer disease” refer to a malignant disease, which is preferably selected from the group consisting of Adenocystic carcinoma (Adenoid cystic carcinoma), Adrenocortical carcinoma, AIDS-related cancers, AIDS-related lymphoma, Anal cancer, Appendix cancer, Astrocytoma, Basal cell carcinoma, Bile duct cancer, Bladder cancer, Bone cancer, Osteosarcoma/Malignant fibrous histiocytoma, Brainstem glioma, Brain tumor, cerebellar astrocytoma, cerebral astrocytoma/malignant glioma, ependymoma, medulloblastoma, supratentorial primitive neuroectodermal tumors, visual pathway and hypothalamic glioma, Breast cancer, Bronchial adenomas/carcinoids, Burkitt lymphoma, childhood Carcinoid tumor, gastrointestinal Carcinoid tumor, Carcinoma of unknown primary, primary Central nervous system lymphoma, childhood Cerebellar astrocytoma, childhood Cerebral astrocytoma/Malignant glioma, Cervical cancer, Childhood cancers, Chronic lymphocytic leukemia, Colon Cancer, Cutaneous T-cell lymphoma including Mycosis Fungoides and Sezary Syndrome, Desmoplastic small round cell tumor, Endometrial cancer, Ependymoma, Esophageal cancer, Ewing's sarcoma in the Ewing family of tumors, Childhood Extracranial germ cell tumor, Extragonadal Germ cell tumor, Extrahepatic bile duct cancer, Intraocular melanoma, Retinoblastoma, Gallbladder cancer, Gastric (Stomach) cancer, Gastrointestinal Carcinoid Tumor, Gastrointestinal stromal tumor (GIST), extracranial, extragonadal, or ovarian Germ cell tumor, Gestational trophoblastic tumor, Glioma of the brain stem, Childhood Cerebral Astrocytoma, Childhood Visual Pathway and Hypothalamic Glioma, Gastric carcinoid, Hairy cell leukemia, Head and neck cancer, Heart cancer, Hepatocellular (liver) cancer, Hodgkin lymphoma, Human Papilloma Virus (HPV)-related cancer, Hypopharyngeal cancer, childhood Hypothalamic and visual pathway glioma, Intraocular Melanoma, Islet Cell Carcinoma (Endocrine Pancreas), Kaposi sarcoma, Kidney cancer (renal cell cancer), Laryngeal Cancer, Lip and Oral Cavity Cancer, Liposarcoma, Liver Cancer, Non-Small Cell Lung Cancer, Small Cell Lung Cancer, Lymphomas, AIDS-related Lymphoma, Burkitt Lymphoma, Hodgkin Lymphoma, Non-Hodgkin Lymphomas, Primary Central Nervous System Lymphoma, Malignant Fibrous Histiocytoma of Bone/Osteosarcoma, Childhood Medulloblastoma, Melanoma, Intraocular (Eye) Melanoma, Merkel Cell Carcinoma, Adult Malignant Mesothelioma, Childhood Mesothelioma, Head or Neck Cancer, Mouth Cancer, Childhood Multiple Endocrine Neoplasia Syndrome, Multiple Myeloma/Plasma Cell Neoplasm, Multiple Myeloma (Cancer of the Bone-Marrow), Nasal cavity and paranasal sinus cancer, Nasopharyngeal carcinoma, Neuroblastoma, Oral Cancer, Oropharyngeal cancer, Osteosarcoma/malignant fibrous histiocytoma of bone, Ovarian cancer, Ovarian epithelial cancer (Surface epithelial-stromal tumor), Ovarian germ cell tumor, Ovarian low malignant potential tumor, Pancreatic cancer, islet cell Pancreatic cancer, Paranasal sinus and nasal cavity cancer, Parathyroid cancer, Penile cancer, Pharyngeal cancer, Pheochromocytoma, Pineal astrocytoma, Pineal germinoma, childhood Pineoblastoma and supratentorial primitive neuroectodermal tumors, Pituitary adenoma, Plasma cell neoplasia/plasmocytoma/Multiple myeloma, Pleuropulmonary blastoma, Primary central nervous system lymphoma, Prostate cancer, Rectal cancer, Renal cell carcinoma (kidney cancer), Cancer of the Renal pelvis and ureter, Retinoblastoma, childhood Rhabdomyosarcoma, Salivary gland cancer, Sarcoma of the Ewing family of tumors, Kaposi Sarcoma, soft tissue Sarcoma, uterine Sarcoma, Skin cancer (nonmelanoma), Skin cancer (melanoma), Merkel cell Skin carcinoma, Small intestine cancer, Squamous cell carcinoma, metastatic Squamous neck cancer with occult primary, soft tissue sarcoma (STS), childhood Supratentorial primitive neuroectodermal tumor, Testicular cancer (seminoma and non-seminoma), Throat cancer, childhood Thymoma, Thymoma and Thymic carcinoma, Thyroid cancer, childhood Thyroid cancer, Transitional cell cancer of the renal pelvis and ureter, gestational Trophoblastic tumor, Urethral cancer, endometrial Uterine cancer, Uterine sarcoma, Vaginal cancer, childhood Visual pathway and hypothalamic glioma, Vulvar cancer, and childhood Wilms tumor (kidney cancer).

[0080] Especially preferred examples of tumors or cancers that are suitable for intratumoral, including peritumoral or locoregional administration, preferably imaging guided loco-regional administration, are prostate cancer, lung cancer, breast cancer, brain cancer, head and neck cancer including cancer of the lips, mouth, or tongue, nasopharyngal cancers or lymphoma, thyroid cancer, thymic cancer, colon cancer, stomach cancer, esophageal cancer, liver cancer, biliary cancer, pancreas cancer, ovary cancer, skin cancer, (melanoma and non-melanoma skin cancer), urinary bladder and urothel, uterus and cervix, anal cancer, bone cancers, kidney cancer, adrenal cancer, testicular cancer, cutaneous T cell lymphoma, cutaneous B cell lymphoma, plasmocytoma, other Hodgkin and non-hodgkin lymphomas with injectable, solitary lesions, adenocystic carcinoma, other salivary gland cancers, neuroendocrine tumors, vulvar cancer, sarcoma (incl. pediatric sarcoma), penile cancer lymphomas.

[0081] Preferably, a tumor or cancer disease is selected from the group consisting of breast cancer (hormone receptor positive or negative forms); melanoma, preferably advanced and/or metastatic melanoma, most preferably advanced cutaneous melanoma (cMEL); squamous cell cancer of the skin (SCC), preferably unresectable and/or advanced SCC, most preferably cutaneous squamous cell carcinoma (cSCC), or other forms of malignant skin cancer; adenocystic carcinoma (ACC), preferably advanced ACC; cutaneous T-cell lymphoma, preferably advanced cutaneous T-cell lymphoma or cutaneous T-cell lymphoma of mycosis fungoides subtype (CTCL-MF); squamous cell carcinoma of the head and neck (HNSCC), preferably advanced or locally advanced HNSCC; follicular lymphoma (FL); marginal zone lymphoma, preferably nodal marginal zone lymphoma (nMZL); mantle cell lymphoma; primary cutaneous anaplastic large cell lymphoma (PC-ALCL); vulvar carcinoma, preferably vulvar squamous cell carcinoma (VSCC); soft tissue sarcoma; breast cancer; hepatocellular carcinoma; colorectal cancer (including MSI-High CRC); neuroendocrine tumors; pancreas cancer; gastroesophageal cancer; uveal melanoma; penile cancer lymphoma; salivary gland cancer; nasopharynx cancers; lung cancer, preferably locally advanced or advanced non-small cell lung cancer or small cell lung cancer of limited or extensive disease, lung metastases of other malignancies; mesothelioma; urothelial or bladder cancer; thyroid cancer; esophageal and gastric cancer; gastric cancer, esophageal cancer, liver cancer; malignancies with liver metastases; ovarian cancer; cervix cancer; renal cancer; adrenal malignancies, soft-tissue sarcoma, hematological malignancies with injectable lesions like cutaneous T-cell lymphoma; solitary or multiple myeloma; Hodgkin's disease; Non-Hodgkin Lymphoma, preferably indolent cutaneously accessible Non-Hodgkin Lymphoma (CTCL) or non-Hodgkin lymphoma with injectable lesions; sarcoma including its various subtypes; glioma grade I-IV; colorectal, rectal or anal cancer. In particular, the terms “tumor”, “cancer” or “cancer disease” as used herein refer to basal cell carcinoma; or melanoma, preferably advanced and/or metastatic melanoma; squamous cell cancer (SCC), preferably SCC of the skin, more preferably unresectable and/or advanced SCC of the skin; or squamous cell carcinoma of the head and neck (HNSCC), preferably advanced and/or platinum-refractory and/or immunotherapy-refractory HNSCC; or vulvar carcinoma or vulvar squamous cell carcinoma (VSCC), preferably unresectable and/or advanced VSCC, more preferably advanced and/or platinum-refractory and/or immunotherapy-refractory VSCC; or adenocystic carcinoma (ACC), preferably advanced ACC; or cutaneous T-cell lymphoma, preferably advanced cutaneous T-cell lymphoma or cutaneous T-cell lymphoma of mycosis fungoides subtype (CTCL-MF), preferably advanced CTCL-MF, preferably cutaneous T-cell lymphoma refractory to local treatment or to chemotherapy; or follicular lymphoma; or marginal zone lymphoma, preferably nodal marginal zone lymphoma (nMZL); or mantle cell lymphoma; or primary cutaneous anaplastic large cell lymphoma (PC-ALCL); or soft tissue sarcoma (STS); or Human Papilloma Virus (HPV)-related cancer; or breast cancer; or hepatocellular carcinoma; or colorectal cancer (including MSI-High CRC); or neuroendocrine tumors; or pancreas cancer; or gastroesophageal cancer; or uveal melanoma; or penile cancer lymphoma. In certain embodiments of the invention, the terms “tumor”, “cancer” or “cancer disease” as used herein refer to basal cell carcinoma; or melanoma, preferably advanced and/or metastatic melanoma; squamous cell cancer (SCC), preferably SCC of the skin, more preferably unresectable and/or advanced SCC of the skin; or squamous cell carcinoma of the head and neck (HNSCC), preferably advanced and/or platinum-refractory and/or immunotherapy-refractory HNSCC; or vulvar carcinoma or vulvar squamous cell carcinoma (VSCC), preferably unresectable and/or advanced VSCC, more preferably advanced and/or platinum-refractory and/or immunotherapy-refractory VSCC; or adenocystic carcinoma (ACC), preferably advanced ACC; or cutaneous T-cell lymphoma, preferably advanced cutaneous T-cell lymphoma or cutaneous T-cell lymphoma of mycosis fungoides subtype (CTCL-MF), more preferably advanced CTCL-MF, more preferably advanced CTCL-MF refractory to local treatment or to chemotherapy; or follicular lymphoma; or marginal zone lymphoma, preferably nodal marginal zone lymphoma (nMZL); or primary cutaneous anaplastic large cell lymphoma (PC-ALCL); or soft tissue sarcoma (STS); or Human Papilloma Virus (HPV)-related cancer According to a preferred embodiment, the invention thus concerns an isRNA for use in the treatment or prophylaxis of tumor and/or cancer diseases, wherein the tumor or the cancer disease is selected from the group consisting of melanoma, preferably advanced and/or metastatic melanoma, preferably advanced cutaneous melanoma (cMEL), squamous cell cancer of the skin (SCC), preferably unresectable and/or advanced SCC or cutaneous squamous cell carcinoma (cSCC), and/or squamous cell carcinoma of the head and neck (HNSCC), preferably advanced and/or immunotherapy-refractory platinum-refractory HNSCC, and/or adenocystic carcinoma (ACC), preferably advanced ACC, and/or cutaneous T-cell lymphoma, preferably advanced cutaneous T-cell lymphoma refractory to local treatment or to chemotherapy.

[0082] In a further preferred embodiment, the invention concerns an isRNA, preferably as described herein, for use in the treatment and/or prophylaxis of a tumor and/or cancer disease, wherein the tumor or cancer disease is selected from the group consisting of
[0083] melanoma, preferably advanced and/or metastatic melanoma, more preferably advanced cutaneous melanoma (cMEL);
[0084] squamous cell cancer (SCC) of the skin, preferably unresectable and/or advanced SCC of the skin, more preferably cutaneous squamous cell carcinoma (cSCC), even more preferably unresectable and/or advanced cSCC;
[0085] squamous cell carcinoma of the head and neck (HNSCC), preferably advanced HNSCC, more preferably immunotherapy-refractory or platinum-refractory HNSCC, even more preferably immunotherapy-refractory advanced HNSCC or platinum-refractory advanced HNSCC;
[0086] adenocystic carcinoma (ACC), preferably advanced ACC;
[0087] cutaneous T-cell lymphoma, preferably advanced cutaneous T-cell lymphoma or cutaneous T-cell lymphoma of mycosis fungoides subtype, more preferably cutaneous T-cell lymphoma refractory to local treatment or to chemotherapy, even more preferably advanced cutaneous T-cell lymphoma refractory to local treatment or to chemotherapy, or cutaneous T-cell lymphoma of mycosis fungoides subtype refractory to local treatment or to chemotherapy, and
[0088] vulvar cancer, preferably vulvar squamous cell cancer (VSCC), more preferably advanced VSCC, even more preferably VSCC refractory to surgery or chemotherapy, most preferably advanced VSCC refractory to surgery or chemotherapy.

[0089] According to a particularly preferred embodiment the invention concerns an isRNA, preferably as described herein, for use in the treatment and/or prophylaxis of a tumor and/or cancer disease, wherein the tumor or the cancer disease is selected from the group consisting of cutaneous melanoma (cMEL), cutaneous squamous cell carcinoma (cSCC), head and neck squamous cell carcinoma (HNSCC), adenoid cystic carcinoma (ACC), cutaneous T-cell lymphoma, preferably cutaneous T-cell lymphoma of mycosis fungoides subtype, and vulvar squamous cell cancer (VSCC), wherein the tumor or the cancer disease is preferably at an advanced stage and/or refractory to standard therapy.

[0090] According to a further particularly preferred embodiment, the invention concerns an isRNA for use in the treatment or prophylaxis of tumor and/or cancer diseases, wherein the tumor or the cancer disease is selected from the group consisting of advanced melanoma, preferably advanced cutaneous melanoma (cMEL), squamous cell carcinoma of the skin (SCC), preferably cutaneous squamous cell carcinoma (cSCC), squamous cell carcinoma of the head and neck (HNSCC), and adenoid cystic carcinoma (adenocystic carcinoma (ACC)).

[0091] In an alternative preferred embodiment the invention concerns an isRNA for use in the treatment or prophylaxis of tumor and/or cancer diseases, wherein the tumor or the cancer disease is selected from the group consisting of advanced cutaneous melanoma (cMEL), cutaneous squamous cell carcinoma (cSCC), head and neck squamous cell carcinoma (hnSCC), and adenoid cystic carcinoma (ACC).

[0092] According to a preferred embodiment, the isRNA as described herein is for use in the treatment of advanced melanoma preferably advanced cutaneous melanoma (cMEL), which was confirmed histologically, preferably an unresectable and/or metastatic (cutaneous) melanoma. More preferably, the melanoma is refractory to standard therapy, in particular to immunotherapy with a checkpoint inhibitor or immunostimulatory agent or with targeted chemotherapy or a combination thereof.

[0093] In another embodiment, the isRNA as described herein is for use in the treatment of advanced SCC, preferably cutaneous squamous cell carcinoma (cSCC), which was confirmed histologically, preferably an unresectable and/or metastatic SCC. More preferably, the SCC is refractory to standard therapy or no therapy exists for the SCC.

[0094] According to a preferred embodiment, the isRNA as described herein is for use in the treatment of locally advanced or advanced HNSCC, which was confirmed histologically, preferably an unresectable and/or recurrent and/or metastatic HNSCC. More preferably, the HNSCC is refractory to standard therapy, in particular to platinum-based therapy or radiation therapy or to immunotherapy with a checkpoint inhibitor or immunostimulatory agent, or a combination of any of the above.

[0095] According to a further preferred embodiment, the isRNA as described herein is for use in the treatment of adenocystic carcinoma (ACC), which was confirmed histologically, preferably an unresectable and/or recurrent and/or metastatic adenocystic carcinoma (ACC). More preferably, the ACC is refractory to standard therapy, in particular to platinum-based therapy or radiation therapy or to immunotherapy with a checkpoint inhibitor or immunostimulatory agent, or a combination of any of the above. According to another embodiment, the isRNA as described herein is for use in the treatment of cutaneous T-cell lymphoma, which was confirmed histologically, preferably an unresectable and/or recurrent and/or metastatic cutaneous T-cell lymphoma. More preferably, the cutaneous T-cell lymphoma is refractory to standard therapy, in particular to platinum-based therapy or radiation therapy or to immunotherapy with a checkpoint inhibitor or immunostimulatory agent, or a combination of any of the above.

[0096] According to a further embodiment, the isRNA as described herein is for use in the treatment of vulvar squamous cell cancer (VSCC), which was confirmed histologically, preferably an unresectable and/or recurrent and/or metastatic VSCC. More preferably, the VSCC is refractory to standard therapy, in particular to platinum-based therapy or radiation therapy or to immunotherapy with a checkpoint inhibitor or immunostimulatory agent, or a combination of any of the above.

[0097] In a preferred embodiment, the isRNA for use in the treatment or prophylaxis of a tumor and/or cancer disease, preferably as described herein, elicits an innate immune response, which may support an adaptive immune response.

[0098] The isRNA for use in the treatment or prophylaxis of a tumor and/or cancer disease as described herein, may preferably be any (double-stranded or single-stranded) RNA, e.g. a coding RNA, as defined herein. In a preferred embodiment, the isRNA for use in the treatment or prophylaxis of a tumor and/or cancer disease as described herein is a non-coding RNA. In this context, the term “non-coding” refers to the fact that the isRNA does preferably not encode a peptide or protein or that the isRNA does preferably not comprise a coding sequence, preferably as described herein.

[0099] In some embodiments, the isRNA for use in the treatment or prophylaxis of a tumor and/or cancer disease as described herein may be a single-stranded, a double-stranded or a partially double-stranded RNA, more preferably a single-stranded RNA, and/or a circular or linear RNA, more preferably a linear RNA. More preferably, the isRNA may be a (linear) single-stranded RNA. Even more preferably, the isRNA may be a (long) (linear) single-stranded) non-coding RNA. In this context, it is particular preferred that the isRNA carries a triphosphate at its 5′-end, which is typically the case for in vitro transcribed RNA. An isRNA may also occur as a short RNA oligonucleotide as defined herein.

[0100] The isRNA for use in the treatment or prophylaxis of a tumor and/or cancer disease as described herein may furthermore be selected from any class of RNA molecules, naturally occurring or prepared synthetically, and which can induce an innate immune response and which preferably supports an adaptive immune response induced by an antigen. In this context, an immune response may occur in various ways. A substantial factor for a suitable (adaptive) immune response is the stimulation of different T cell sub-populations. T-lymphocytes are typically divided into two sub-populations, the T-helper 1 (Th1) cells and the T-helper 2 (Th2) cells, with which the immune system is capable of destroying intracellular (Th1) and extracellular (Th2) pathogens (e.g. antigens). The two Th cell populations differ in the pattern of the effector proteins (cytokines) produced by them. Thus, Th1 cells assist the cellular immune response by activation of macrophages and cytotoxic T cells. Th2 cells, on the other hand, promote the humoral immune response by stimulation of B-cells for conversion into plasma cells and by formation of antibodies (e.g. against antigens). The Th1/Th2 ratio is therefore of great importance in the induction and maintenance of an adaptive immune response. In connection with the present invention, the Th1/Th2 ratio of the (adaptive) immune response is preferably shifted in the direction towards the cellular response (Th1 response) and a cellular immune response is thereby induced.

[0101] According to one example, the innate immune system, which may support an adaptive immune response, may be activated by ligands of Toll-like receptors (TLRs). TLRs are a family of highly conserved pattern recognition receptor (PRR) polypeptides that recognize pathogen-associated molecular patterns (PAMPs) and play a critical role in innate immunity in mammals. Currently at least thirteen family members, designated TLR1-TLR13 (Toll-like receptors: TLR1, TLR2, TLR3, TLR4, TLR5, TLR6, TLR7, TLR8, TLR9, TLR10, TLR11, TLR12 or TLR13), have been identified. Furthermore, a number of specific TLR ligands have been identified. It was found, for example, that unmethylated bacterial DNA and synthetic analogs thereof (CpG DNA) are ligands for TLR9 (Hemmi H et al. (2000) Nature 408:740-5; Bauer S et al. (2001) Proc Natl Acad Sci USA 98, 9237-42). Furthermore, it has been reported that ligands for certain TLRs include certain nucleic acid molecules and that certain types of RNA are immunostimulatory in a sequence-independent or sequence-dependent manner, wherein these various immunostimulatory RNAs may e.g. stimulate TLR3, TLR7, or TLR8, or intracellular receptors such as RIG-I, MDA-5, etc. For example, Lipford et al. determined certain G,U-containing oligoribonucleotides as immunostimulatory by acting via TLR7 and TLR8 (see WO 03/086280). The immunostimulatory G,U-containing oligoribonucleotides described by Lipford et al. were believed to be derivable from RNA sources including ribosomal RNA, transfer RNA, messenger RNA, and viral RNA.

[0102] Preferably, the isRNA for use in the treatment or prophylaxis of a tumor and/or cancer disease as described herein may comprise any RNA sequence known to be immunostimulatory, including, without being limited thereto, RNA sequences representing and/or encoding ligands of TLRs, preferably selected from human family members TLR1-TLR10 or murine family members TLR1-TLR13, more preferably selected from (human) family members TLR1-TLR10, even more preferably from TLR7 and TLR8, ligands for intracellular receptors for RNA (such as RIG-I or MDA-5, etc.) (see e.g. Meylan, E., Tschopp, J. (2006). Toll-like receptors and RNA helicases: two parallel ways to trigger antiviral responses. Mol. Cell 22, 561-569), or any other immunostimulatory RNA sequence. Furthermore, (classes of) immunostimulatory RNA molecules for use in the treatment or prophylaxis of a tumor and/or cancer disease as described herein, may include any other RNA capable of eliciting an immune response. Without being limited thereto, the isRNA for use in the treatment or prophylaxis of a tumor and/or cancer disease as described herein may include ribosomal RNA (rRNA), transfer RNA (tRNA), messenger RNA (mRNA), and viral RNA (vRNA). In preferred embodiments, the isRNA may have a length of 1000 to 5000, of 500 to 5000, of 5 to 5000, or of 5 to 1000, 5 to 500, 5 to 250, of 5 to 100, of 5 to 50 or of 5 to 30 nucleotides.

[0103] According to a particularly preferred embodiment, the isRNA for use in the treatment or prophylaxis of a tumor and/or cancer disease as described herein consists of or comprises a nucleic acid of the following formula (I) or (II):

GₗXₘGₙ, (formula (I))

wherein:
[0104] G is guanosine (guanine), uridine (uracil) or an analogue of guanosine (guanine) or uridine (uracil);
[0105] X is guanosine (guanine), (uridine) uracil, adenosine (adenine), thymidine (thymine), cytidine (cytosine) or an analogue of the above-mentioned nucleotides (nucleosides);
[0106] l is an integer from 1 to 40,
   [0107] wherein
   [0108] when l=1 G is guanosine (guanine) or an analogue thereof,
   [0109] when l>1 at least 50% of the nucleotides (nucleosides) are guanosine (guanine) or an analogue thereof;
[0110] m is an integer and is at least 3;
   [0111] wherein
   [0112] when m=3 X is uridine (uracil) or an analogue thereof,
   [0113] when m>3 at least 3 successive uridines (uracils) or analogues of uridine (uracil) occur;
[0114] n is an integer from 1 to 40,
   [0115] wherein
   [0116] when n=1 G is guanosine (guanine) or an analogue thereof,
   [0117] when n>1 at least 50% of the nucleotides (nucleosides) are guanosine (guanine) or an analogue thereof;

CₗXₘCₙ, (formula (II))

wherein:
[0118] C is cytidine (cytosine), uridine (uracil) or an analogue of cytidine (cytosine) or uridine (uracil);
[0119] X is guanosine (guanine), uridine (uracil), adenosine (adenine), thymidine (thymine), cytidine (cytosine) or an analogue of the above-mentioned nucleotides (nucleosides);
[0120] l is an integer from 1 to 40,
   [0121] wherein
   [0122] when l=1 C is cytidine (cytosine) or an analogue thereof,
   [0123] when l>1 at least 50% of the nucleotides (nucleosides) are cytidine (cytosine) or an analogue thereof;
[0124] m is an integer and is at least 3;
   [0125] wherein
   [0126] when m=3 X is uridine (uracil) or an analogue thereof,
   [0127] when m>3 at least 3 successive uridines (uracils) or analogues of uridine (uracil) occur;
[0128] n is an integer from 1 to 40,
   [0129] wherein
   [0130] when n=1 C is cytidine (cytosine) or an analogue thereof,
   [0131] when n>1 at least 50% of the nucleotides (nucleosides) are cytidine (cytosine) or an analogue thereof.

[0132] The nucleic acids of formula (I) or (II), which may be used as isRNA may be relatively short nucleic acid molecules with a typical length of approximately from 5 to 100 (but may also be longer than 100 nucleotides for specific embodiments, e.g. up to 200 nucleotides), from 5 to 90 or from 5 to 80 nucleotides, preferably a length of approximately from 5 to 70, more preferably a length of approximately from 8 to 60 and, more preferably a length of approximately from 15 to 60 nucleotides, more preferably from 20 to 60, most preferably from 30 to 60 nucleotides. If the nucleic acid of the inventive nucleic acid cargo complex has a maximum length of, for example, 100 nucleotides, m will typically be ≤98. The number of nucleotides G in the nucleic acid of formula (I) is determined by l or n. l and n, independently of one another, are each an integer from 1 to 40, wherein when l or n=1 G is guanosine or an analogue thereof, and when l or n>1 at least 50% of the nucleotides are guanosine or an analogue thereof. For example, without implying any limitation, when l or n=4 Gl or Gn can be, for example, a GUGU, GGUU, UGUG, UUGG, GUUG, GGGU, GGUG, GUGG, UGGG or GGGG, etc.; when l or n=5 Gl or Gn can be, for example, a GGGUU, GGUGU, GUGGU, UGGGU, UGGUG, UGUGG, UUGGG, GUGUG, GGGGU, GGGUG, GGUGG, GUGGG, UGGGG, or GGGGG, etc.; etc. A nucleotide adjacent to Xₘ in the nucleic acid of formula (I) according to the invention is preferably not a uracil. Similarly, the number of nucleotides C in the nucleic acid of formula (II) according to the invention is determined by l or n. l and n, independently of one another, are each an integer from 1 to 40, wherein when l or n=1 C is cytidine or an analogue thereof, and when l or n>1 at least 50% of the nucleotides are cytidine or an analogue thereof. For example, without implying any limitation, when l or n=4, Cl or Cn can be, for example, a CUCU, CCUU, UCUC, UUCC, CUUC, CCCU, CCUC, CUCC, UCCC or CCCC, etc.; when l or n=5 Cl or Cn can be, for example, a CCCUU, CCUCU, CUCCU, UCCCU, UCCUC, UCUCC, UUCCC, CUCUC, CCCCU, CCCUC, CCUCC, CUCCC, UCCCC, or CCCCC, etc.; etc. A nucleotide adjacent to Xₘ in the nucleic acid of formula (II) according to the invention is preferably not a uracil. Preferably, for formula (I), when l or n>1, at least 60%, 70%, 80%, 90% or even 100% of the nucleotides are guanosine or an analogue thereof, as defined above. The remaining nucleotides to 100% (when guanosine constitutes less than 100% of the nucleotides) in the flanking sequences Gl and/or Gn are uridine or an analogue thereof, as defined hereinbefore. Also preferably, l and n, independently of one another, are each an integer from 2 to 30, more preferably an integer from 2 to 20 and yet more preferably an integer from 2 to 15. The lower limit of l or n can be varied if necessary and is at least 1, preferably at least 2, more preferably at least 3, 4, 5, 6, 7, 8, 9 or 10. This definition applies correspondingly to formula (II).

[0133] According to a particularly preferred embodiment, a nucleic acid according to any of formulas (I) or (II) above, which may be used as isRNA in the context of the present invention, may be selected from a nucleic acid sequence consisting or comprising any of the following sequences SEQ ID NOs: 471 to 554, or from a sequence having at least 60%, 70%, 80%, 90%, or even 95% sequence identity with any of these sequences. In some embodiments, the isRNA is selected from a nucleic acid sequence consisting or comprising any one of the nucleic acid sequences SEQ ID NOs: 471 to 554, or a fragment or variant of any one of these sequences.

[0134] According to a further preferred embodiment, the isRNA for use in the treatment or prophylaxis of a tumor and/or cancer disease as described herein consists of or comprises a nucleic acid of formula (III) or (IV):

(NᵤGₗXₘGₙNᵥ)ₐ, (formula (III))

wherein:
[0135] G is guanosine (guanine), uridine (uracil) or an analogue of guanosine (guanine) or uridine (uracil), preferably guanosine (guanine) or an analogue thereof;
[0136] X is guanosine (guanine), uridine (uracil), adenosine (adenine), thymidine (thymine), cytidine (cytosine), or an analogue of these nucleotides (nucleosides), preferably uridine (uracil) or an analogue thereof;
[0137] N is a nucleic acid sequence having a length of about 4 to 50, preferably of about 4 to 40, more preferably of about 4 to 30 or 4 to 20 nucleic acids, each N independently being selected from guanosine (guanine), uridine (uracil), adenosine (adenine), thymidine (thymine), cytidine (cytosine) or an analogue of these nucleotides (nucleosides);
[0138] a is an integer from 1 to 20, preferably from 1 to 15, most preferably from 1 to 10;
[0139] l is an integer from 1 to 40,
   [0140] wherein when l=1, G is guanosine (guanine) or an analogue thereof,
   [0141] when l>1, at least 50% of these nucleotides (nucleosides) are guanosine (guanine) or an analogue thereof;
[0142] m is an integer and is at least 3;
   [0143] wherein when m=3, X is uridine (uracil) or an analogue thereof, and
   [0144] when m>3, at least 3 successive uridines (uracils) or analogues of uridine (uracil) occur;
[0145] n is an integer from 1 to 40,
   [0146] wherein when n=1, G is guanosine (guanine) or an analogue thereof,
   [0147] when n>1, at least 50% of these nucleotides (nucleosides) are guanosine (guanine) or an analogue thereof;
[0148] u,v may be independently from each other an integer from 0 to 50,
   [0149] preferably wherein when u=0, v≥1, or when v=0, u≥1;
      wherein the nucleic acid molecule of formula (III) has a length of at least 50 nucleotides, preferably of at least 100 nucleotides, more preferably of at least 150 nucleotides, even more preferably of at least 200 nucleotides and most preferably of at least 250 nucleotides.

(NᵤCₗXₘCₙNᵥ)ₐ, (formula (IV))

wherein:
[0150] C is cytidine (cytosine), uridine (uracil) or an analogue of cytidine (cytosine) or uridine (uracil), preferably cytidine (cytosine) or an analogue thereof;
[0151] X is guanosine (guanine), uridine (uracil), adenosine (adenine), thymidine (thymine), cytidine (cytosine) or an analogue of the above-mentioned nucleotides (nucleosides), preferably uridine (uracil) or an analogue thereof;
[0152] N is each a nucleic acid sequence having independent from each other a length of about 4 to 50, preferably of about 4 to 40, more preferably of about 4 to 30 or 4 to 20 nucleic acids, each N independently being selected from guanosine (guanine), uridine (uracil), adenosine (adenine), thymidine (thymine), cytidine (cytosine) or an analogue of these nucleotides (nucleosides);
[0153] a is an integer from 1 to 20, preferably from 1 to 15, most preferably from 1 to 10;
[0154] l is an integer from 1 to 40,
   [0155] wherein when l=1, C is cytidine (cytosine) or an analogue thereof,
   [0156] when l>1, at least 50% of these nucleotides (nucleosides) are cytidine (cytosine) or an analogue thereof;
[0157] m is an integer and is at least 3;
   [0158] wherein when m=3, X is uridine (uracil) or an analogue thereof,
   [0159] when m>3, at least 3 successive uridines (uracils) or analogues of uridine (uracil) occur;
[0160] n is an integer from 1 to 40,
   [0161] wherein when n=1, C is cytidine (cytosine) or an analogue thereof,
   [0162] when n>1, at least 50% of these nucleotides (nucleosides) are cytidine (cytosine) or an analogue thereof.
[0163] u, v may be independently from each other an integer from 0 to 50,
   [0164] preferably wherein when u=0, v≥1, or when v=0, u≥1;
      wherein the nucleic acid molecule of formula (V) according to the invention has a length of at least 50 nucleotides, preferably of at least 100 nucleotides, more preferably of at least 150 nucleotides, even more preferably of at least 200 nucleotides and most preferably of at least 250 nucleotides.

[0165] For formula (IV), any of the definitions given above for elements N (i.e. Nᵤ and Nᵥ) and X (Xₘ), particularly the core structure as defined above, as well as for integers a, l, m, n, u and v, similarly apply to elements of formula (IV) correspondingly, wherein in formula (IV) the core structure is defined by CₗXₘCₙ. The definition of bordering elements Nᵤ and Nᵥ is identical to the definitions given above for Nᵤ and Nᵥ.

[0166] According to a very particularly preferred embodiment, the nucleic acid molecule, preferably immunostimulating RNA according to formula (III) may be selected from e.g. any of the sequences according to SEQ ID NOs: 555 to 563 or from a sequence having at least 60%, 70%, 80%, 90%, or even 95% sequence identity with any of these sequences.

[0167] Preferably, the isRNA as used herein comprises or consists of a nucleic acid sequence according to any one of SEQ ID NO: 555 to 563, or a fragment or variant of any one of these sequences.

[0168] In this context particularly preferred are immunostimulating RNAs according to any one of SEQ ID NOs: 433 to 437, 1014 to 1016, 1055 or 1056. More preferably, an immunostimulating RNA as used herein, comprises or consists of a nucleic acid sequence according to any one of SEQ ID NOs: 433 to 437, 1014 to 1016, 1055 or 1056, or a fragment or variant of any one of these sequences. Even more preferably, the immunostimulating RNA comprises or consists of a nucleic acid sequence having at least 60%, 70%, 80%, 90%, or even 95% sequence identity with any one of the nucleic acid sequences according to SEQ ID NOs: 433 to 437, 1014 to 1016, 1055 or 1056.

[0169] According to a particularly preferred embodiment, an immunostimulating RNA as used herein, comprises or consists of a nucleic acid sequence according to any one of SEQ ID NOs: 433; 434, or 1014 to 1016, or a fragment or variant of any one of these sequences. Even more preferably, the immunostimulating RNA comprises or consists of a nucleic acid sequence having at least 60%, 70%, 80%, 90%, or even 95% sequence identity with the nucleic acid sequence according to any one of SEQ ID NOs: 433, 434 or 1014 to 1016.

[0170] According to another very particularly preferred embodiment, the nucleic acid molecule according to formula (IV) may be selected from e.g. any of the sequences according to SEQ ID NOs: 433; 434, or 1014 to 1016, or from a sequence having at least 60%, 70%, 80%, 90%, or even 95% sequence identity with any of these sequences. Preferably, the isRNA as used herein comprises or consists of a nucleic acid sequence according to SEQ ID NO: 433; 434 or 1014 to 1016, or a fragment or variant of any one of these sequences.

[0171] Further, all modifications disclosed herein in the context of coding RNA may also be applied to non-coding RNA, if applicable.

[0172] The isRNA for use as described herein may be administered naked without being associated with any further vehicle, carrier, transfection or complexation agent.

[0173] In a preferred embodiment, the isRNA for use in the treatment or prophylaxis of a tumor and/or cancer disease as described herein is formulated together with further compounds for increasing the transfection efficiency and/or the immunostimulatory properties of the isRNA. Such compounds are also termed herein carriers, vehicles, transfection or complexation agents. Preferably, the isRNA for use in the treatment or prophylaxis of a tumor and/or cancer disease as described herein is complexed with a cationic or polycationic compound, preferably with a cationic or polycationic polymer, a cationic or polycationic peptide or protein, e.g. protamine, a cationic or polycationic polysaccharide and/or a cationic or polycationic lipid. According to a particularly preferred embodiment, the isRNA for use in the treatment or prophylaxis of a tumor and/or cancer disease as described herein is complexed with a cationic or polycationic compound, wherein the cationic or polycationic compound is a polymeric carrier.

[0174] Such cationic or polycationic polymers, cationic or polycationic peptides or proteins, cationic or polycationic polysaccharides, cationic or polycationic lipids or polymeric carriers are useful as carriers, vehicles, transfection or complexation agents of nucleic acids in the context of the present invention, in particular of the isRNA for use as described herein. Accordingly, in a further embodiment of the invention it is preferred that the isRNA is associated with or complexed with a cationic or polycationic compound or a polymeric carrier, optionally in a weight ratio selected from a range of about 6:1 (w/w) to about 0.25:1 (w/w), more preferably from about 5:1 (w/w) to about 0.5:1 (w/w), even more preferably of about 4:1 (w/w) to about 1:1 (w/w) or of about 3:1 (w/w) to about 1:1 (w/w), and most preferably a ratio of about 3:1 (w/w) to about 2:1 (w/w) of RNA to cationic or polycationic compound and/or with a polymeric carrier; or optionally in a nitrogen/phosphate ratio of RNA to cationic or polycationic compound and/or polymeric carrier in the range of about 0.1 to 10, preferably in a range of about 0.3 to 4 or 0.3 to 1, and most preferably in a range of about 0.5-1 or 0.7 to 1, and even most preferably in a range of about 0.3 to 0.9 or 0.5 to 0.9.

[0175] The ratio of the isRNA for use in the treatment or prophylaxis of a tumor and/or cancer disease as described herein, and the cationic or polycationic compound, may be calculated on the basis of the nitrogen/phosphate ratio (N/P-ratio) of all these components. In the context of the present invention, an N/P-ratio is preferably in the range of about 0.01 to 4, 0.01 to 2, 0.1 to 2 or 0.1 to 1.5 regarding the ratio of nucleic acids:cationic or polycationic peptide contained in the inventive vaccine, and most preferably in the range of about 0.1 to 1. Alternatively, the N/P ratio of the isRNA to the cationic or polycationic compound, preferably the cationic or polycationic peptide or protein, is in the range of about 0.1 to 10, including a range of about 0.3 to 4, of about 0.5 to 2, of about 0.7 to 2 and of about 0.7 to 1.5. Such an N/P ratio is preferably designed to provide good transfection properties in vivo and transport into and through cell membranes. Preferably, for this purpose, cationic or polycationic compound and/or polymeric carriers as used herein, are based on peptide sequences.

[0176] Cationic or polycationic compounds, being particularly preferred agents in this context include protamine, nucleoline, spermine or spermidine, or other cationic peptides or proteins, such as poly-L-lysine (PLL), poly-arginine, basic polypeptides, cell penetrating peptides (CPPs), including HIV-binding peptides, HIV-1 Tat (HIV), Tat-derived peptides, Penetratin, VP22 derived or analog peptides, HSV VP22 (Herpes simplex), MAP, KALA or protein transduction domains (PTDs), PpT620, proline-rich peptides, arginine-rich peptides, lysine-rich peptides, MPG-peptide(s), Pep-1, L-oligomers, Calcitonin peptide(s), Antennapedia-derived peptides (particularly from Drosophila antennapedia), pAntp, pIsl, FGF, Lactoferrin, Transportan, Buforin-2, Bac715-24, SynB, SynB(1), pVEC, hCT-derived peptides, SAP, or histones. In this context, protamine is particularly preferred.

[0177] Additionally, preferred cationic or polycationic proteins or peptides may be selected from the following proteins or peptides having the following total formula (V):

(Arg)ₗ;(Lys)ₘ;(His)ₙ;(Orn)ₒ;(Xaa)ₓ, (formula (V)

wherein l+m+n+o+x=8-15, and l, m, n or o independently of each other may be any number selected from 0, 1, 2, 3, 4, 5, 6, 7, 8, 9, 10, 11, 12, 13, 14 or 15, provided that the overall content of Arg, Lys, His and Orn represents at least 50% of all amino acids of the oligopeptide; and Xaa may be any amino acid selected from native (=naturally occurring) or non-native amino acids except of Arg, Lys, His or Orn; and x may be any number selected from 0, 1, 2, 3 or 4, provided, that the overall content of Xaa does not exceed 50% of all amino acids of the oligopeptide. Particularly preferred cationic peptides in this context are e.g. Arg₇, Arg₈, Arg₉, H₃R₉, R₉H₃, H₃R₉H₃, YSSR₉SSY, (RKH)₄, Y(RKH)₂R, etc. In this context the disclosure of WO 2009/030481 is incorporated herewith by reference.

[0178] A polymeric carrier used according to the invention might be a polymeric carrier formed by disulfide-crosslinked cationic components.

[0179] According to a further particularly preferred embodiment, cationic or polycationic peptides or proteins of the polymeric carrier, having the empirical sum formula (V) as shown above and which comprise or are additionally modified to comprise at least one —SH moeity, may be, without being restricted thereto, selected from the subgroup consisting of generic formulas Arg₇ (also termed as R₇), Arg₉ (also termed R₉), Arg₁₂ (also termed as R₁₂).

[0180] According to a one further particularly preferred embodiment, the cationic or polycationic peptide or protein of the polymeric carrier, when defined according to formula {(Arg)ₗ; (Lys)ₘ; (His)ₙ; (Orn)ₒ; (Xaa)ₓ} (formula (V)) as shown above and which comprise or are additionally modified to comprise at least one —SH moeity, may be, without being restricted thereto, selected from subformula (Va):

{(Arg)ₗ;(Lys)ₘ;(His)ₙ;(Orn)ₒ;(Xaa′)ₓ(Cys)_{y}} formula (Va)

wherein (Arg)ₗ; (Lys)ₘ; (His)ₙ; (Orn)ₒ; and x are as defined herein, Xaa′ is any amino acid selected from native (=naturally occurring) or non-native amino acids except of Arg, Lys, His, Orn or Cys and y is any number selected from 0, 1, 2, 3, 4, 5, 6, 7, 8, 9, 10, 11, 12, 13, 14, 15, 16, 17, 18, 19, 20, 21-30, 31-40, 41-50, 51-60, 61-70, 71-80 and 81-90, provided that the overall content of Arg (Arginine), Lys (Lysine), His (Histidine) and Orn (Ornithine) represents at least 10% of all amino acids of the oligopeptide.

[0181] This embodiment may apply to situations, wherein the cationic or polycationic peptide or protein of the polymeric carrier, e.g. when defined according to empirical formula (Arg)ₗ; (Lys)ₘ; (His)ₙ; (Orn)ₒ; (Xaa)ₓ (formula (V)) as shown above, comprises or has been modified with at least one cysteine as —SH moiety in the above meaning such that the cationic or polycationic peptide as cationic component carries at least one cysteine, which is capable to form a disulfide bond with other components of the polymeric carrier. Examples may comprise any of the following sequences:

[0182] Cys(Arg₇) (SEQ ID NO: 581), Cys(Arg₈) (SEQ ID NO: 582), Cys(Arg₉) (SEQ ID NO: 583), Cys(Arg₁₀) (SEQ ID NO: 584), Cys(Arg₁₁) (SEQ ID NO: 585), Cys(Arg₁₂) (SEQ ID NO: 580) (SEQ ID NO: 571), Cys(Arg₁₃) (SEQ ID NO: 586), Cys(Arg₁₄) (SEQ ID NO: 587), Cys(Arg₁₅) (SEQ ID NO: 588), Cys(Arg₁₆) (SEQ ID NO: 589), Cys(Arg₁₇) (SEQ ID NO: 590), Cys(Arg₁₈) (SEQ ID NO: 591), Cys(Arg₁₉) (SEQ ID NO: 592), Cys(Arg₂₀) (SEQ ID NO: 593).

[0183] According to another particularly preferred embodiment, the cationic or polycationic peptide or protein of the polymeric carrier, when defined according to formula {(Arg)ₗ; (Lys)ₘ; (His)ₙ; (Orn)ₒ; (Xaa)ₓ} (formula (V)) as shown above, may be, without being restricted thereto, selected from subformula (Vb):

Cys1{(Arg)ₗ;(Lys)ₘ;(His)ₙ;(Orn)ₒ;(Xaa)ₓ}Cys2 (formula (Vb))

wherein empirical formula {(Arg)ₗ; (Lys)ₘ; (His)ₙ; (Orn)ₒ; (Xaa)ₓ} (formula (V)) is as defined herein and forms a core of an amino acid sequence according to (semiempirical) formula (V) and wherein Cys1 and Cys2 are cysteines proximal to, or terminal to (Arg)ₗ; (Lys)ₘ; (His)ₙ; (Orn)ₒ; (Xaa)ₓ. Examples may comprise any of the above sequences flanked by two Cys and following sequences:

[0184] Cys(Arg₇)Cys (SEQ ID NO: 566), Cys(Arg₈)Cys (SEQ ID NO: 567), Cys(Arg₉)Cys (SEQ ID NO: 568), Cys(Arg₁₀)Cys (SEQ ID NO: 569, Cys(Arg₁₁)Cys (SEQ ID NO: 570), Cys(Arg₁₂)Cys (SEQ ID NO: 579), Cys(Arg₁₃)Cys (SEQ ID NO: 571), Cys(Arg₁₄)Cys (SEQ ID NO: 572), Cys(Arg₁₅)Cys (SEQ ID NO: 573), Cys(Arg₁₆)Cys (SEQ ID NO: 574), Cys(Arg₁₇)Cys (SEQ ID NO: 575), Cys(Arg₁₈)Cys (SEQ ID NO: 576), Cys(Arg₁₉)Cys (SEQ ID NO: 577), Cys(Arg₂₀)Cys (SEQ ID NO: 578).

[0185] This embodiment may apply to situations, wherein the cationic or polycationic peptide or protein of the polymeric carrier, e.g. when defined according to empirical formula (Arg)ₗ; (Lys)ₘ; (His)ₙ; (Orn)ₒ; (Xaa)ₓ (formula (V)) as shown above, has been modified with at least two cysteines as —SH moieties in the above meaning such that the cationic or polycationic peptide of the inventive polymeric carrier cargo complex as cationic component carries at least two (terminal) cysteines, which are capable to form a disulfide bond with other components of the polymeric carrier.

[0186] In a preferred embodiment, the polymeric carrier is formed by, comprises or consists of the peptide CysArg₁₂Cys (CRRRRRRRRRRRRC) (SEQ ID NO: 579) or CysArg₁₂ (CRRRRRRRRRRRR) (SEQ ID NO: 580). In some embodiments, the polymeric carrier compound is formed by, comprises or consists of a (R12C)-(R12C) dimer (Arg₁₂Cys-CysArg₁₂ dimer), wherein the individual peptide monomers in the dimer (CR12 (CysArg₁₂; SEQ ID NO: 580)), are connected via —SH groups. In further preferred embodiments, the polymeric carrier compound is formed by, comprises or consists of a (WR12C)-(WR12C) dimer (TrpArg₁₂Cys-CysArg₁₂Trp dimer), wherein the individual peptide monomers in the dimer (WR12C (TrpArg₁₂Cys; SEQ ID NO: 1017)), are connected via —SH groups. According to certain embodiments, the polymeric carrier compound is formed by, comprises or consists of a (CR12)-(CR12C)-(CR12) trimer (Arg₁₂Cys-CysArg₁₂Cys-CysArg₁₂ trimer), wherein the individual peptide monomers in the dimer (CR12C (CysArg₁₂Cys; SEQ ID NO: 579) and CR12 (CysArg₁₂; SEQ ID NO: 580)), are connected via —SH groups. In specific embodiments, the polymeric carrier consists of a (R12C)-(R12C) dimer, a (WR12C)-(WR12C) dimer, or a (CR12)-(CR12C)-(CR12) trimer, wherein the individual cationic peptide (elements) in the dimer (e.g., (WR12C)), or the trimer (e.g., (CR12)) are connected via —SH groups of their cysteine residues.

[0187] According to a second alternative, at least one cationic (or polycationic) component of the polymeric carrier may be selected from e.g. any (non-peptidic) cationic or polycationic polymer suitable in this context, provided that this (non-peptidic) cationic or polycationic polymer exhibits or is modified to exhibit at least one —SH-moiety, which provides for a disulfide bond linking the cationic or polycationic polymer with another component of the polymeric carrier as defined herein. Thus, likewise as defined herein, the polymeric carrier may comprise the same or different cationic or polycationic polymers.

[0188] In the specific case that the cationic component of the polymeric carrier comprises a (non-peptidic) cationic or polycationic polymer the cationic properties of the (non-peptidic) cationic or polycationic polymer may be determined upon its content of cationic charges when compared to the overall charges of the components of the cationic polymer.

[0189] Preferably, the content of cationic charges in the cationic polymer at a (physiological) pH as defined herein is at least 10%, 20%, or 30%, preferably at least 40%, more preferably at least 50%, 60% or 70%, but also preferably at least 80%, 90%, or even 95%, 96%, 97%, 98%, 99% or 100%, most preferably at least 30%, 40%, 50%, 60%, 70%, 80%, 90%, 95%, 96%, 97%, 98%, 99% or 100%, or may be in the range of about 10% to 90%, more preferably in the range of about 30% to 100%, even preferably in the range of about 50% to 100%, e.g. 50, 60, 70, 80%, 90% or 100%, or in a range formed by any two of the afore mentioned values, provided, that the content of all charges, e.g. positive and negative charges at a (physiological) pH as defined herein, in the entire cationic polymer is 100%.

[0190] Preferably, the (non-peptidic) cationic component of the polymeric carrier represents a cationic or polycationic polymer, typically exhibiting a molecular weight of about 0.1 or 0.5 kDa to about 100 kDa, preferably of about 1 kDa to about 75 kDa, more preferably of about 5 kDa to about 50 kDa, even more preferably of about 5 kDa to about 30 kDa, or a molecular weight of about 10 kDa to about 50 kDa, even more preferably of about 10 kDa to about 30 kDa. Additionally, the (non-peptidic) cationic or polycationic polymer typically exhibits at least one —SH-moiety, which is capable to form a disulfide linkage upon condensation with either other cationic components or other components of the polymeric carrier as defined herein.

[0191] In the above context, the (non-peptidic) cationic component of the polymeric carrier may be selected from acrylates, modified acrylates, such as pDMAEMA (poly(dimethylaminoethyl methylacrylate)), chitosanes, aziridines or 2-ethyl-2-oxazoline (forming oligo ethylenimines or modified oligoethylenimines), polymers obtained by reaction of bisacrylates with amines forming oligo beta aminoesters or poly amido amines, or other polymers like polyesters, polycarbonates, etc. Each molecule of these (non-peptidic) cationic or polycationic polymers typically exhibits at least one —SH-moiety, wherein these at least one —SH-moiety may be introduced into the (non-peptidic) cationic or polycationic polymer by chemical modifications, e.g. using imonothiolan, 3-thio propionic acid or introduction of —SH-moieties containing amino acids, such as cysteine or any further (modified) amino acid. Such —SH-moieties are preferably as already defined above.

[0192] The disulfide-crosslinked cationic components may be the same or different from each other. The polymeric carrier can also contain further components. It is also particularly preferred that the polymeric carrier used according to the present invention comprises mixtures of cationic peptides, proteins or polymers and optionally further components as defined herein, which are crosslinked by disulfide bonds as described herein. In this context, the disclosure of WO 2012/013326 is incorporated herewith by reference.

[0193] In this context, the cationic components, which form basis for the polymeric carrier by disulfide-crosslinkage, are typically selected from any suitable cationic or polycationic peptide, protein or polymer suitable for this purpose, particular any cationic or polycationic peptide, protein or polymer capable to complex the isRNA for use as described herein, and thereby preferably condensing the isRNA. The cationic or polycationic peptide, protein or polymer, is preferably a linear molecule. However, branched cationic or polycationic peptides, proteins or polymers may also be used.

[0194] Every disulfide-crosslinking cationic or polycationic protein, peptide or polymer of the polymeric carrier, which may be used to complex the isRNA for use as described herein contains at least one —SH moiety, most preferably at least one cysteine residue or any further chemical group exhibiting an —SH moiety, capable to form a disulfide linkage upon condensation with at least one further cationic or polycationic protein, peptide or polymer as cationic component of the polymeric carrier as mentioned herein.

[0195] As defined above, the polymeric carrier, which may be used to complex the isRNA for use as described herein may be formed by disulfide-crosslinked cationic (or polycationic) components.

[0196] A complex of a nucleic acid, such as the isRNA for use as described herein, complexed with such polymeric carriers are also referred to herein as “polymeric carrier cargo complexes”.

[0197] In this context, it is particularly preferred that the isRNA for use in the treatment or prophylaxis of a tumor and/or cancer disease as described herein is complexed with a polymeric carrier as defined above. Preferably, the isRNA, (e.g. comprising an RNA sequence according to any of formulae I to IV), more preferably comprising an RNA sequence according to any one of SEQ ID NOs. 433 to 437, 1014 to 1016, or a fragment or variant of any one of these sequences, most preferably comprising an RNA sequence according to any one of SEQ ID NOs: 433, 434 or 1014 to 1016, or a fragment or variant of any one of these sequences, is complexed with a polymeric carrier comprising or formed by disulfide-crosslinked peptides according to formula V, Va or Vb, preferably a polymeric carrier formed by Cys(Arg₁₂)Cys or Cys(Arg₁₂). Such a particularly preferred embodiment is also termed herein “RNAdjuvant”.

[0198] In a further particular embodiment, the polymeric carrier which may be used to complex the isRNA for use in the treatment or prophylaxis of a tumor and/or cancer disease as described herein may be selected from a polymeric carrier molecule according to generic formula (VI):

L-P¹-S—[S-P²-S]ₙ—S-P³-L formula (VI)

wherein,
[0199] P¹ and P³ are different or identical to each other and represent a linear or branched hydrophilic polymer chain, each P¹ and P³ exhibiting at least one —SH-moiety, capable to form a disulfide linkage upon condensation with component P², or alternatively with (AA), (AA)ₓ, or [(AA)ₓ]_{z} if such components are used as a linker between P¹ and P² or P³ and P² and/or with further components (e.g. (AA), (AA)ₓ, [(AA)ₓ]_{z} or L), the linear or branched hydrophilic polymer chain selected independent from each other from polyethylene glycol (PEG), poly-N-(2-hydroxypropyl)methacrylamide, poly-2-(methacryloyloxy)ethyl phosphorylcholines, poly(hydroxyalkyl L-asparagine), poly(2-(methacryloyloxy)ethyl phosphorylcholine), hydroxyethylstarch or poly(hydroxyalkyl L-glutamine), wherein the hydrophilic polymer chain exhibits a molecular weight of about 1 kDa to about 100 kDa, preferably of about 2 kDa to about 25 kDa; or more preferably of about 2 kDa to about 10 kDa, e.g. about 5 kDa to about 25 kDa or 5 kDa to about 10 kDa;
[0200] P² is a cationic or polycationic peptide or protein, e.g. as defined above for the polymeric carrier formed by disulfide-crosslinked cationic components, and preferably having a length of about 3 to about 100 amino acids, more preferably having a length of about 3 to about 50 amino acids, even more preferably having a length of about 3 to about 25 amino acids, e.g. a length of about 3 to 10, 5 to 15, 10 to 20 or 15 to 25 amino acids, more preferably a length of about 5 to about 20 and even more preferably a length of about 10 to about 20; or
   [0201] is a cationic or polycationic polymer, e.g. as defined above for the polymeric carrier formed by disulfide-crosslinked cationic components, typically having a molecular weight of about 0.5 kDa to about 30 kDa, including a molecular weight of about 1 kDa to about 20 kDa, even more preferably of about 1.5 kDa to about 10 kDa, or having a molecular weight of about 0.5 kDa to about 100 kDa, including a molecular weight of about 10 kDa to about 50 kDa, even more preferably of about 10 kDa to about 30 kDa;
   [0202] each P² exhibiting at least two —SH-moieties, capable to form a disulfide linkage upon condensation with further components P² or component(s) P¹ and/or P³ or alternatively with further components (e.g. (AA), (AA)ₓ, or [(AA)ₓ]_{z});
[0203] —S—S— is a (reversible) disulfide bond (the brackets are omitted for better readability), wherein S preferably represents sulphur or a —SH carrying moiety, which has formed a (reversible) disulfide bond. The (reversible) disulfide bond is preferably formed by condensation of —SH-moieties of either components P¹ and P², P² and P², or P² and P³, or optionally of further components as defined herein (e.g. L, (AA), (AA)ₓ, [(AA)ₓ]_{z}, etc); The —SH-moiety may be part of the structure of these components or added by a modification as defined below;
[0204] L is an optional ligand, which may be present or not, and may be selected independent from the other from RGD, Transferrin, Folate, a signal peptide or signal sequence, a localization signal or sequence, a nuclear localization signal or sequence (NLS), an antibody, a cell penetrating peptide, (e.g. TAT or KALA), a ligand of a receptor (e.g. cytokines, hormones, growth factors etc), small molecules (e.g. carbohydrates like mannose or galactose or synthetic ligands), small molecule agonists, inhibitors or antagonists of receptors (e.g. RGD peptidomimetic analogues), or any further protein as defined herein, etc.;
[0205] n is an integer, typically selected from a range of about 1 to 50, preferably from a range of about 1, 2 or 3 to 30, more preferably from a range of about 1, 2, 3, 4, or 5 to 25, or a range of about 1, 2, 3, 4, or 5 to 20, or a range of about 1, 2, 3, 4, or 5 to 15, or a range of about 1, 2, 3, 4, or 5 to 10, including e.g. a range of about 4 to 9, 4 to 10, 3 to 20, 4 to 20, 5 to 20, or 10 to 20, or a range of about 3 to 15, 4 to 15, 5 to 15, or 10 to 15, or a range of about 6 to 11 or 7 to 10. Most preferably, n is in a range of about 1, 2, 3, 4, or 5 to 10, more preferably in a range of about 1, 2, 3, or 4 to 9, in a range of about 1, 2, 3, or 4 to 8, or in a range of about 1, 2, or 3 to 7.

[0206] In this context, the disclosure of WO 2011/026641 and WO 2012/116811 is incorporated herewith by reference. Each of hydrophilic polymers P¹ and P³ typically exhibits at least one —SH-moiety, wherein the at least one —SH-moiety is capable of forming a disulfide linkage upon reaction with component P² or with component (AA) or (AA)ₓ, if used as linker between P¹ and P² or P³ and P² as defined below and optionally with a further component, e.g. L and/or (AA) or (AA)ₓ, e.g. if two or more —SH-moieties are contained. The following subformulae “P¹-S—S-P²” and “P²-S—S-P³” within the generic formula above, wherein any of S, P¹ and P³ are as defined herein, typically represent a situation, wherein one —SH-moiety of hydrophilic polymers P¹ and P³ was condensed with one —SH-moiety of component P² of the generic formula above, wherein both sulphurs of these —SH-moieties form a disulfide bond —S—S—. These —SH-moieties are typically provided by each of the hydrophilic polymers P¹ and P³, e.g. via an internal cysteine or any further (modified) amino acid or compound which carries a —SH moiety. Accordingly, the subformulae “P¹—S—S-P²” and “P²-S—S-P³” may also be written as “P¹-Cys-Cys-P²” and “P²-Cys-Cys-P³”, if the —SH-moiety is provided by a cysteine, wherein the term Cys-Cys represents two cysteines coupled via a disulfide bond, not via a peptide bond. In this case, the term “—S—S—” in these formulae may also be written as “—S-Cys”, as “-Cys-S” or as “-Cys-Cys-”. In this context, the term “-Cys-Cys-” does not represent a peptide bond but a linkage of two cysteines via their —SH-moieties to form a disulfide bond. Accordingly, the term “-Cys-Cys-” also may be understood generally as “-(Cys-S)—(S-Cys)-”, wherein in this specific case S indicates the sulphur of the —SH-moiety of cysteine. Likewise, the terms “—S-Cys” and “—Cys-S” indicate a disulfide bond between a —SH containing moiety and a cysteine, which may also be written as “—S—(S-Cys)” and “-(Cys-S)—S”. Alternatively, the hydrophilic polymers P¹ and P³ may be modified with a —SH moiety, preferably via a chemical reaction with a compound carrying a —SH moiety, such that each of the hydrophilic polymers P¹ and P³ carries at least one such —SH moiety. Such a compound carrying a —SH moiety may be e.g. an (additional) cysteine or any further (modified) amino acid, which carries a —SH moiety. Such a compound may also be any non-amino compound or moiety, which contains or allows to introduce a —SH moiety into hydrophilic polymers P¹ and P³ as defined herein. Such non-amino compounds may be attached to the hydrophilic polymers P¹ and P³ of the polymeric carrier via chemical reactions or binding of compounds, e.g. by binding of a 3-thio propionic acid or thioimolane, by amide formation (e.g. carboxylic acids, sulphonic acids, amines, etc), by Michael addition (e.g maleinimide moieties, unsatured carbonyls, etc), by click chemistry (e.g. azides or alkines), by alkene/alkine methatesis (e.g. alkenes or alkines), imine or hydrozone formation (aldehydes or ketones, hydrazins, hydroxylamins, amines), complexation reactions (avidin, biotin, protein G) or components which allow Sn-type substitution reactions (e.g halogenalkans, thiols, alcohols, amines, hydrazines, hydrazides, sulphonic acid esters, oxyphosphonium salts) or other chemical moieties which can be utilized in the attachment of further components. A particularly preferred PEG derivate in this context is alpha-methoxy-omega-mercapto poly(ethylene glycol). In each case, the SH-moiety, e.g. of a cysteine or of any further (modified) amino acid or compound, may be present at the terminal ends or internally at any position of hydrophilic polymers P¹ and P³. As defined herein, each of hydrophilic polymers P¹ and P³ typically exhibits at least one —SH-moiety preferably at one terminal end, but may also contain two or even more —SH-moieties, which may be used to additionally attach further components as defined herein, preferably further functional peptides or proteins e.g. a ligand, an amino acid component (AA) or (AA)ₓ, antibodies, cell penetrating peptides or enhancer peptides (e.g. TAT, KALA), etc.

[0207] As defined above, ligands (L), may be optionally used in the polymeric carrier molecule according to generic formula (VI), e.g. for direction of the inventive carrier polymer and its entire “cargo” (e.g. the isRNA for use in the treatment or prophylaxis of a tumor and/or cancer disease as described herein) into specific cells. They may be selected independent from the other from RGD, Transferrin, Folate, a signal peptide or signal sequence, a localization signal or sequence, a nuclear localization signal or sequence (NLS), an antibody, a cell penetrating peptide (CPP), (e.g. TAT, KALA), a ligand of a receptor (e.g. cytokines, hormones, growth factors etc), small molecules (e.g. carbohydrates like mannose or galactose or synthetic ligands), small molecule agonists, inhibitors or antagonists of receptors (e.g. RGD peptidomimetic analogues) or any such molecule as further defined below, etc. Particularly preferred are cell penetrating peptides (CPPs), which induce a pH-mediated conformational change in the endosome and lead to an improved release of the inventive polymeric carrier (in complex with a nucleic acid) from the endosome by insertion into the lipid layer of the liposome. Such called CPPs or cationic peptides for transportation, may include, without being limited thereto protamine, nucleoline, spermine or spermidine, poly-L-lysine (PLL), basic polypeptides, poly-arginine, chimeric CPPs, such as Transportan, or MPG peptides, HIV-binding peptides, Tat, HIV-1 Tat (HIV), Tat-derived peptides, oligoarginines, members of the penetratin family, e.g. Penetratin, Antennapedia-derived peptides (particularly from Drosophila antennapedia), pAntp, pIsl, etc., antimicrobial-derived CPPs e.g. Buforin-2, Bac715-24, SynB, SynB(1), pVEC, hCT-derived peptides, SAP, MAP, PpTG20, proline-rich peptides, Loligomers, arginine-rich peptides, Calcitonin-peptides, FGF, Lactoferrin, poly-L-lysine, poly-arginine, histones, VP22 derived or analog peptides, Pestivirus Erns, HSV, VP22 (Herpes simplex), MAP, KALA or protein transduction domains (PTDs, PpT620, proline-rich peptides, arginine-rich peptides, lysine-rich peptides, Pep-1, L-oligomers, Calcitonin peptide(s), etc. Particularly preferred in this context is mannose as ligand to target antigen presenting cells, which typically carry mannose receptors on their cell membrane. In a further preferred embodiment of the present invention, galactose as optional ligand can be used to target hepatocytes. Such ligands may be attached to component P¹ and/or P³ by reversible disulfide bonds as defined below or by any other possible chemical attachment, e.g. by amide formation (e.g. carboxylic acids, sulphonic acids, amines, etc), by Michael addition (e.g. maleinimide moieties, a, (3 unsatured carbonyls, etc), by click chemistry (e.g. azides or alkines), by alkene/alkine methatesis (e.g. alkenes or alkines), imine or hydrozone formation (aldehydes or ketons, hydrazins, hydroxylamins, amines), complexation reactions (avidin, biotin, protein G) or components which allow Sn-type substitution reactions (e.g halogenalkans, thiols, alcohols, amines, hydrazines, hydrazides, sulphonic acid esters, oxyphosphonium salts) or other chemical moieties which can be utilized in the attachment of further components.

[0208] In the context of formula (VI) of the present invention components P¹ and P³ represent a linear or branched hydrophilic polymer chain, containing at least one —SH-moiety, each P¹ and P³ independently selected from each other, e.g. from polyethylene glycol (PEG), poly-N-(2-hydroxypropyl)methacrylamide, poly-2-(methacryloyloxy)ethyl phosphorylcholines, poly(hydroxyalkyl L-asparagine) or poly(hydroxyalkyl L-glutamine). P¹ and P³ may be identical or different to each other. Preferably, each of hydrophilic polymers P¹ and P³ exhibits a molecular weight of about 1 kDa to about 100 kDa, preferably of about 1 kDa to about 75 kDa, more preferably of about 5 kDa to about 50 kDa, even more preferably of about 5 kDa to about 25 kDa. Additionally, each of hydrophilic polymers P¹ and P³ typically exhibits at least one —SH-moiety, wherein the at least one —SH-moiety is capable to form a disulfide linkage upon reaction with component P² or with component (AA) or (AA)ₓ, if used as linker between P¹ and P² or P³ and P² as defined below and optionally with a further component, e.g. L and/or (AA) or (AA)ₓ, e.g. if two or more —SH-moieties are contained. The following subformulae “P¹—S—S-P²” and “P²-S—S-P³” within generic formula (VI) above (the brackets are omitted for better readability), wherein any of S, P¹ and P³ are as defined herein, typically represent a situation, wherein one-SH-moiety of hydrophilic polymers P¹ and P³ was condensed with one —SH-moiety of component P² of generic formula (VI) above, wherein both sulphurs of these —SH-moieties form a disulfide bond —S—S— as defined herein in formula (VI). These —SH-moieties are typically provided by each of the hydrophilic polymers P¹ and P³, e.g. via an internal cysteine or any further (modified) amino acid or compound which carries a —SH moiety. Accordingly, the subformulae “P¹—S—S-P²” and “P²-S—S-P³” may also be written as “P₁-Cys-Cys-P₂” and “P₂-Cys-Cys-P₃”, if the —SH-moiety is provided by a cysteine, wherein the term Cys-Cys represents two cysteines coupled via a disulfide bond, not via a peptide bond. In this case, the term “—S—S—” in these formulae may also be written as “—S-Cys”, as “-Cys-S” or as “-Cys-Cys-”. In this context, the term “-Cys-Cys-” does not represent a peptide bond but a linkage of two cysteines via their —SH-moieties to form a disulfide bond. Accordingly, the term “-Cys-Cys-” also may be understood generally as “-(Cys-S)—(S-Cys)-”, wherein in this specific case S indicates the sulphur of the —SH-moiety of cysteine. Likewise, the terms “—S-Cys” and “—Cys-S” indicate a disulfide bond between a —SH containing moiety and a cysteine, which may also be written as “—S—(S-Cys)” and “-(Cys-S)—S”. Alternatively, the hydrophilic polymers P¹ and P³ may be modified with a —SH moiety, preferably via a chemical reaction with a compound carrying a —SH moiety, such that each of the hydrophilic polymers P¹ and P³ carries at least one such —SH moiety. Such a compound carrying a —SH moiety may be e.g. an (additional) cysteine or any further (modified) amino acid, which carries a —SH moiety. Such a compound may also be any non-amino compound or moiety, which contains or allows to introduce a —SH moiety into hydrophilic polymers P¹ and P³ as defined herein. Such non-amino compounds may be attached to the hydrophilic polymers P¹ and P³ of formula (VI) of the polymeric carrier according to the present invention via chemical reactions or binding of compounds, e.g. by binding of a 3-thio propionic acid or thioimolane, by amide formation (e.g. carboxylic acids, sulphonic acids, amines, etc), by Michael addition (e.g maleinimide moieties, α, β unsatured carbonyls, etc), by click chemistry (e.g. azides or alkines), by alkene/alkine methatesis (e.g. alkenes or alkines), imine or hydrozone formation (aldehydes or ketones, hydrazins, hydroxylamins, amines), complexation reactions (avidin, biotin, protein G) or components which allow Sn-type substitution reactions (e.g halogenalkans, thiols, alcohols, amines, hydrazines, hydrazides, sulphonic acid esters, oxyphosphonium salts) or other chemical moieties which can be utilized in the attachment of further components. A particularly preferred PEG derivate in this context is alpha-methoxy-omega-mercapto poly(ethylene glycol). In each case, the SH-moiety, e.g. of a cysteine or of any further (modified) amino acid or compound, may be present at the terminal ends or internally at any position of hydrophilic polymers P¹ and P³. As defined herein, each of hydrophilic polymers P¹ and P³ typically exhibits at least one —SH-moiety preferably at one terminal end, but may also contain two or even more —SH-moieties, which may be used to additionally attach further components as defined herein, preferably further functional peptides or proteins e.g. a ligand, an amino acid component (AA) or (AA)ₓ, antibodies, cell penetrating peptides or enhancer peptides (e.g. TAT, KALA), etc.

[0209] According to one preferred alternative, such further functional peptides or proteins may comprise so-called cell penetrating peptides (CPPs) or cationic peptides for transportation. Particularly preferred are CPPs, which induce a pH-mediated conformational change in the endosome and lead to an improved release of the inventive polymeric carrier (in complex with a nucleic acid) from the endosome by insertion into the lipid layer of the liposome. Such cell penetrating peptides (CPPs) or cationic peptides for transportation, may include, without being limited thereto protamine, nucleoline, spermine or spermidine, poly-L-lysine (PLL), basic polypeptides, poly-arginine, chimeric CPPs, such as Transportan, or MPG peptides, HIV-binding peptides, Tat, HIV-1 Tat (HIV), Tat-derived peptides, oligoarginines, members of the penetratin family, e.g. Penetratin, Antennapedia-derived peptides (particularly from Drosophila antennapedia), pAntp, pIsl, etc., antimicrobial-derived CPPs e.g. Buforin-2, Bac715-24, SynB, SynB(1), pVEC, hCT-derived peptides, SAP, MAP, PpTG20, proline-rich peptides, Loligomers, arginine-rich peptides, Calcitonin-peptides, FGF, Lactoferrin, poly-L-lysine, poly-arginine, histones, VP22 derived or analog peptides, Pestivirus Erns, HSV, VP22 (Herpes simplex), MAP, KALA or protein transduction domains (PTDs, PpT620, prolin-rich peptides, arginine-rich peptides, lysine-rich peptides, Pep-1, L-oligomers, Calcitonin peptide(s), etc.

[0210] According to a further preferred embodiment of the present invention, each of hydrophilic polymers P¹ and P³ of formula (VI) of the polymeric carrier used according to the present invention may also contain at least one further functional moiety, which allows attaching further components as defined herein, e.g. a ligand as defined above, or functionalities which allow the attachment of further components, e.g. by amide formation (e.g. carboxylic acids, sulphonic acids, amines, etc), by Michael addition (e.g maleinimide moieties, unsatured carbonyls, etc), by click chemistry (e.g. azides or alkines), by alkene/alkine methatesis (e.g. alkenes or alkines), imine or hydrozone formation (aldehydes or ketons, hydrazins, hydroxylamins, amines), complexation reactions (avidin, biotin, protein G) or components which allow Sn-type substitution reactions (e.g halogenalkans, thiols, alcohols, amines, hydrazines, hydrazides, sulphonic acid esters, oxyphosphonium salts) or other chemical moieties which can be utilized in the attachment of further components. Further functional moieties may comprise an amino acid component (AA) as defined herein or (AA)ₓ, wherein (AA) is preferably an amino component as defined above. In the above context, x is preferably an integer and may be selected from a range of about 1 to 100, preferably from a range of about 1 to 50, more preferably 1 to 30, and even more preferably selected from a number comprising 1, 2, 3, 4, 5, 6, 7, 8, 9, 10, 11, 12, 13, 14 or 15-30, e.g. from a range of about 1 to 30, from a range of about 1 to 15, or from a number comprising 1, 2, 3, 4, 5, 6, 7, 8, 9, 10, 11, 12, 13, 14 or 15, or may be selected from a range formed by any two of the afore mentioned values. Most preferably, x is 1. Such an amino acid component (AA) or (AA)ₓ may be contained in every part of the inventive polymeric carrier according to formula (VI) above and therefore may be attached to all components of the polymeric carrier according to formula (VI). It is particularly preferred that amino acid component (AA) or (AA)ₓ is present as a ligand or part of the repetitive component [S-P²-S]ₙ within formula (VI) of the polymeric carrier.

[0211] In the context of the entire formula (VI) of the polymeric carrier may be preferably defined as follows:

L-P¹-S-[Cys-P²-Cys]ₙ-S-P³-L

wherein L, P¹, P², P³ and n are as defined herein, S is sulphur and each Cys provides for one —SH-moiety for the disulfide bond.

[0212] According to a particular embodiment, the polymeric carrier according to formula (VI) as defined above, may comprise at least one amino acid component (AA) or (AA)ₓ, as defined above. Such an amino acid component (AA) or (AA)ₓ may be contained in every part of the inventive polymeric carrier according to formula (VI) above and therefore may be attached to all components of the polymeric carrier according to formula (VI). It is particularly preferred that amino acid component (AA) or (AA)ₓ is present as a ligand or part of the repetitive component [S-P2-S]ₙ within formula (VI) of the polymeric carrier. The amino acid component (AA) or (AA)ₓ preferably contains or is flanked (e.g. terminally) by at least one —SH containing moiety, which allows introducing this component (AA) or (AA)ₓ via a disulfide bond into the polymeric carrier according to formula (VI) as defined herein. Such a —SH-containing moiety may be any —SH containing moiety (or, of course, one sulphur of a disulfide bond), e.g. a cysteine residue. In the specific case that the —SH containing moiety represents a cysteine, the amino acid component (AA)ₓ may also be read as -Cys-(AA)ₓ- or -Cys-(AA)ₓ-Cys- wherein Cys represents cysteine and provides for the necessary —SH-moiety for a disulfide bond. The —SH containing moiety may be also introduced into the amino acid component (AA)ₓ using any of modifications or reactions as shown above for components P¹, P² or P³. In the specific case that the amino acid component (AA)ₓ is linked to two components of the polymeric carrier according to formula (VI) it is preferred that (AA) or (AA)ₓ contains at least two —SH-moieties, e.g. at least two cysteines, preferably at its terminal ends. This is particularly preferred if (AA) or (AA)ₓ is part of the repetitive component [S-P2-S]ₙ. Alternatively, the amino acid component (AA) or (AA)ₓ is introduced into the polymeric carrier according to formula (VI) as defined herein via any chemical possible addition reaction. Therefore the amino acid component (AA) or (AA)ₓ contains at least one further functional moiety, which allows attaching same to a further component as defined herein, e.g. component P¹ or P³, P², L, or a further amino acid component (AA) or (AA)ₓ, etc. Such functional moieties may be selected from functionalities which allow the attachment of further components, e.g. functionalities as defined herein, e.g. by amide formation (e.g. carboxylic acids, sulphonic acids, amines, etc), by Michael addition (e.g maleinimide moieties, a, 3 unsatured carbonyls, etc), by click chemistry (e.g. azides or alkines), by alkene/alkine methatesis (e.g. alkenes or alkines), imine or hydrozone formation (aldehydes or ketons, hydrazins, hydroxylamins, amines), complexation reactions (avidin, biotin, protein G) or components which allow Sn-type substitution reactions (e.g halogenalkans, thiols, alcohols, amines, hydrazines, hydrazides, sulphonic acid esters, oxyphosphonium salts) or other chemical moieties which can be utilized in the attachment of further components.

[0213] The amino acid component (AA) or (AA)ₓ in the polymeric carrier of formula (VI) may also occur as a mixed repetitive amino acid component [(AA)ₓ]_{z}, wherein the number of amino acid components (AA) or (AA)ₓ is further defined by integer z. In this context, z may be selected from a range of about 1 to 30, preferably from a range of about 1 to 15, more preferably 1 to 10 or 1 to 5 and even more preferably selected from a number selected from 1, 2, 3, 4, 5, 6, 7, 8, 9, 10, 11, 12, 13, 14 or 15, or may be selected from a range formed by any two of the afore mentioned values.

[0214] According to a specific and particularly preferred alternative, the amino acid component (AA) or (AA)ₓ, preferably written as S-(AA)ₓ-S or [S-(AA)ₓ-S] may be used to modify component P², particularly the content of component S-P²-S in repetitive component [S-P²-S]ₙ of the polymeric carrier of formula (VI) above. This may be represented in the context of the entire polymeric carrier according to formula (VI) e.g. by following formula (VIa):

L-P¹-S-{[S-P²-S]ₐ[S-(AA)ₓ-S]_{b}}S-P³-L,

wherein x, S, L, AA, P¹, P² and P³ are preferably as defined herein. In formula (VIa) above, any of the single components [S-P²-S] and [S-(AA)ₓ-S] may occur in any order in the subformula {[S-P²-S]ₐ[S-(AA)ₓ-S]_{b}}. The numbers of single components [S-P²-S] and [S-(AA)ₓ-S] in the subformula {[S-P²-S]ₐ[S-(AA)ₓ-S]_{b}} are determined by integers a and b, wherein a+b=n. n is an integer and is defined as above for formula (VI).

[0215] a is an integer, typically selected independent from integer b from a range of about 1 to 50, preferably from a range of about 1, 2 or 3 to 30, more preferably from a range of about 1, 2, 3, 4, or 5 to 25, or a range of about 1, 2, 3, 4, or 5 to 20, or a range of about 1, 2, 3, 4, or 5 to 15, or a range of about 1, 2, 3, 4, or 5 to 10, including e.g. a range of about 3 to 20, 4 to 20, 5 to 20, or 10 to 20, or a range of about 3 to 15, 4 to 15, 5 to 15, or 10 to 15, or a range of about 6 to 11 or 7 to 10. Most preferably, a is in a range of about 1, 2, 3, 4, or 5 to 10, more preferably in a range of about 1, 2, 3, or 4 to 9, in a range of about 1, 2, 3, or 4 to 8, or in a range of about 1, 2, or 3 to 7.

[0216] b is an integer, typically selected independent from integer a from a range of about 0 to 50 or 1 to 50, preferably from a range of about 0, 1, 2 or 3 to 30, more preferably from a range of about 0, 1, 2, 3, 4, or 5 to 25, or a range of about 0, 1, 2, 3, 4, or 5 to 20, or a range of about 0, 1, 2, 3, 4, or 5 to 15, or a range of about 0, 1, 2, 3, 4, or 5 to 10, including e.g. a range of about 3 to 20, 4 to 20, 5 to 20, or 10 to 20, or a range of about 3 to 15, 4 to 15, 5 to 15, or 10 to 15, or a range of about 6 to 11 or 7 to 10. Most preferably, b is in a range of about 1, 2, 3, 4, or 5 to 10, more preferably in a range of about 1, 2, 3, or 4 to 9, in a range of about 1, 2, 3, or 4 to 8, or in a range of about 1, 2, or 3 to 7.

[0217] In this context, it is particularly preferred that the isRNA for use in the treatment or prophylaxis of a tumor and/or cancer disease as described herein is complexed at least partially with a cationic or polycationic compound and/or a polymeric carrier, preferably cationic proteins or peptides. In this context, the disclosure of WO 2010/037539 and WO 2012/113513 is incorporated herewith by reference. “Partially” in that context means that only a part of the RNA is complexed with a cationic compound and that the rest of the RNA is (preferably comprised in the same formulation) in uncomplexed form (“free”). Preferably the ratio of complexed RNA to free RNA (in the inventive composition) is selected from a range of about 5:1 (w/w) to about 1:10 (w/w), more preferably from a range of about 4:1 (w/w) to about 1:8 (w/w), even more preferably from a range of about 3:1 (w/w) to about 1:5 (w/w) or 1:3 (w/w), and most preferably the ratio of complexed RNA to free RNA in the inventive composition is selected from a ratio of about 1:1 (w/w).

[0218] According to a preferred embodiment, the isRNA for use in the treatment or prophylaxis of a tumor and/or cancer disease as described herein may be complexed with lipids to form one or more liposomes, lipid nanoparticles and/or lipoplexes.

[0219] Lipid-based formulations have been increasingly recognized as one of the most promising delivery systems for RNA due to their biocompatibility and their ease of large-scale production. Cationic lipids have been widely studied as synthetic materials for delivery of RNA. After mixing together, nucleic acids are condensed by cationic lipids to form lipid/nucleic acid complexes known as lipoplexes. These lipid complexes are able to protect genetic material from the action of nucleases and to deliver it into cells by interacting with the negatively charged cell membrane. Lipoplexes can be prepared by directly mixing positively charged lipids at physiological pH with negatively charged nucleic acids.

[0220] Conventional liposomes consist of a lipid bilayer that can be composed of cationic, anionic, or neutral (phospho)lipids and cholesterol, which encloses an aqueous core. Both the lipid bilayer and the aqueous space can incorporate hydrophobic or hydrophilic compounds, respectively. Liposome characteristics and behaviour in vivo can be modified by addition of a hydrophilic polymer coating, e.g. polyethylene glycol (PEG), to the liposome surface to confer steric stabilization. Furthermore, liposomes can be used for specific targeting by attaching ligands (e.g., antibodies, peptides, and carbohydrates) to its surface or to the terminal end of the attached PEG chains (Front Pharmacol. 2015 Dec. 1; 6:286).

[0221] Liposomes are colloidal lipid-based and surfactant-based delivery systems composed of a phospholipid bilayer surrounding an aqueous compartment. They may present as spherical vesicles and can range in size from 20 nm to a few microns. Cationic lipid-based liposomes are able to complex with negatively charged nucleic acids via electrostatic interactions, resulting in complexes that offer biocompatibility, low toxicity, and the possibility of the large-scale production required for in vivo clinical applications. Liposomes can fuse with the plasma membrane for uptake; once inside the cell, the liposomes are processed via the endocytic pathway and the genetic material is then released from the endosome/carrier into the cytoplasm. Liposomes have long been perceived as drug delivery vehicles because of their superior biocompatibility, given that liposomes are basically analogs of biological membranes, and can be prepared from both natural and synthetic phospholipids (Int J Nanomedicine. 2014; 9: 1833-1843).

[0222] Cationic liposomes have been traditionally the most commonly used non-viral delivery systems for oligonucleotides, including plasmid DNA, antisense oligos, and siRNA/small hairpin RNA-shRNA). Cationic lipids, such as DOTAP, (1,2-dioleoyl-3-trimethylammonium-propane) and DOTMA (N-[1-(2,3-dioleoyloxy)propyl]-N,N,N-trimethyl-ammonium methyl sulfate) can form complexes or lipoplexes with negatively charged nucleic acids to form nanoparticles by electrostatic interaction, providing high in vitro transfection efficiency. Furthermore, neutral lipid-based nanoliposomes for RNA delivery as e.g. neutral 1,2-dioleoyl-sn-glycero-3-phosphatidylcholine (DOPC)-based nanoliposomes were developed. (Adv Drug Deliv Rev. 2014 February; 66: 110-116.).

[0223] Therefore, in one embodiment, the isRNA for use in the treatment or prophylaxis of a tumor and/or cancer disease as described herein is complexed with cationic lipids and/or neutral lipids and thereby forms liposomes, lipid nanoparticles, lipoplexes or neutral lipid-based nanoliposomes.

[0224] According to some embodiments, the isRNA for use as described herein is formulated as a lipid formulation. The lipid formulation is preferably selected from, but not limited to, liposomes, lipoplexes, copolymers, such as PLGA, and lipid nanoparticles.

[0225] In one preferred embodiment, a lipid nanoparticle (LNP) comprises:

[0226] (a) a nucleic acid,

[0227] (b) a cationic lipid,

[0228] (c) an aggregation reducing agent (such as polyethylene glycol (PEG) lipid or PEG-modified lipid),

[0229] (d) optionally a non-cationic lipid (such as a neutral lipid), and

[0230] (e) optionally, a sterol.

[0231] In one embodiment, the lipid nanoparticle formulation consists of (i) at least one cationic lipid; (ii) a neutral lipid; (iii) a sterol, e.g., cholesterol; and (iv) a PEG-lipid, in a molar ratio of about 20-60% cationic lipid:5-25% neutral lipid:25-55% sterol; 0.5-15% PEG-lipid.

[0232] Cationic Lipids

[0233] The lipid nanoparticle preferably includes a cationic lipid suitable for forming a lipid nanoparticle. Preferably, the cationic lipid carries a net positive charge at about physiological pH.

[0234] The cationic lipid may be, for example, N,N-dioleyl-N,N-dimethylammonium chloride (DODAC), N,N-distearyl-N,N-dimethylammonium bromide (DDAB), 1,2-dioleoyltrimethylammoniumpropane chloride (DOTAP) (also known as N-(2,3-dioleoyloxy)propyl)-N,N,N-trimethylammonium chloride and 1,2-Dioleyloxy-3-trimethylaminopropane chloride salt), N-(1-(2,3-dioleyloxy)propyl)-N,N,N-trimethylammonium chloride (DOTMA), N,N-dimethyl-2,3-dioleyloxy)propylamine (DODMA), 1,2-DiLinoleyloxy-N,N-dimethylaminopropane (DLinDMA), 1,2-Dilinolenyloxy-N,N-dimethylaminopropane (DLenDMA), 1,2-di-y-linolenyloxy-N,N-dimethylaminopropane (γ-DLenDMA), 1,2-Dilinoleylcarbamoyloxy-3-dimethylaminopropane (DLin-C-DAP), 1,2-Dilinoleyoxy-3-(dimethylamino)acetoxypropane (DLin-DAC), 1,2-Dilinoleyoxy-3-morpholinopropane (DLin-MA), 1,2-Dilinoleoyl-3-dimethylaminopropane (DLinDAP), 1,2-Dilinoleylthio-3-dimethylaminopropane (DLin-S-DMA), 1-Linoleoyl-2-linoleyloxy-3-dimethylaminopropane (DLin-2-DMAP), 1,2-Dilinoleyloxy-3-trimethylaminopropane chloride salt (DLin-TMA.Cl), 1,2-Dilinoleoyl-3-trimethylaminopropane chloride salt (DLin-TAP.Cl), 1,2-Dilinoleyloxy-3-(N-methylpiperazino)propane (DLin-MPZ), or 3-(N,N-Dilinoleylamino)-1,2-propanediol (DLinAP), 3-(N,N-Dioleylamino)-1,2-propanedio (DOAP), 1,2-Dilinoleyloxo-3-(2-N,N-dimethylamino)ethoxypropane (DLin-EG-DM A), 2,2-Dilinoleyl-4-dimethylaminomethyl-[1,3]-dioxolane (DLin-K-DMA) or analogs thereof, (3aR,5s,6aS)-N,N-dimethyl-2,2-di((9Z,12Z)-octadeca-9,12-dienyl)tetrahydro-3aH-cyclopenta[d][1,3]dioxol-5-amine, (6Z,9Z,28Z,31Z)-heptatriaconta-6,9,28,31-tetraen-19-yl4-(dimethylamino)butanoate (MC3), 1,1′-(2-(4-(2-((2-(bis(2-hydroxydodecyl)amino)ethyl)(2-hydroxydodecyl)amino)ethyl)piperazin-1-yl)ethylazanediyl)didodecan-2-ol (C12-200), 2,2-dilinoleyl-4-(2-dimethylaminoethyl)-[1,3]-dioxolane (DLin-K-C2-DMA), 2,2-dilinoleyl-4-dimethylaminomethyl-[1,3]-dioxolane (DLin-K-DMA), (6Z,9Z,28Z,31Z)-heptatriaconta-6,9,28,31-tetraen-19-yl 4-(dimethylamino) butanoate (DLin-M-C3-DMA), 3-((6Z,9Z,28Z,31Z)-heptatriaconta-6,9,28,31-tetraen-19-yloxy)-N,N-dimethylpropan-1-amine (MC3 Ether), 4-((6Z,9Z,28Z,31Z)-heptatriaconta-6,9,28,31-tetraen-19-yloxy)-N,N-dimethylbutan-1-amine (MC4 Ether), or any combination of any of the foregoing. Other cationic lipids include, but are not limited to, N,N-distearyl-N,N-dimethylammonium bromide (DDAB), 3P-(N—(N′,N′-dimethylaminoethane)-carbamoyl)cholesterol (DC-Chol), N-(1-(2,3-dioleyloxy)propyl)-N-2-(sperminecarboxamido)ethyl)-N,N-dimethylammonium trifluoracetate (DOSPA), dioctadecylamidoglycyl carboxyspermine (DOGS), 1,2-dileoyl-sn-3-phosphoethanolamine (DOPE), 1,2-dioleoyl-3-dimethylammonium propane (DODAP), N-(1,2-dimyristyloxyprop-3-yl)-N,N-dimethyl-N-hydroxyethyl ammonium bromide (DMRIE), and 2,2-Dilinoleyl-4-dimethylaminoethyl-[1,3]-dioxolane (XTC). Additionally, commercial preparations of cationic lipids can be used, such as, e.g., LIPOFECTIN (including DOTMA and DOPE, available from GIBCO/BRL), and Lipofectamine (comprising DOSPA and DOPE, available from GIBCO/BRL).

[0235] Other suitable cationic lipids are disclosed in International Publication Nos. WO 09/086558, WO 09/127060, WO 10/048536, WO 10/054406, WO 10/088537, WO 10/129709, and WO 2011/153493; U.S. Patent Publication Nos. 2011/0256175, 2012/0128760, and 2012/0027803; U.S. Pat. No. 8,158,601; and Love et al, PNAS, 107(5), 1864-69, 2010. Other suitable amino lipids include those having alternative fatty acid groups and other dialkylamino groups, including those, in which the alkyl substituents are different (e.g., N-ethyl-N-methylamino-, and N-propyl-N-ethylamino-). In general, amino lipids having less saturated acyl chains are more easily sized, particularly when the complexes must be sized below about 0.3 microns, for purposes of filter sterilization. Amino lipids containing unsaturated fatty acids with carbon chain lengths in the range of C14 to C22 may be used. Other scaffolds can also be used to separate the amino group and the fatty acid or fatty alkyl portion of the amino lipid.

[0236] In a further preferred embodiment, the LNP comprises the cationic lipid with formula (III) according to the patent application PCT/EP2017/064066. In this context, the disclosure of PCT/EP2017/064066 is also incorporated herein by reference.

[0237] In certain embodiments, amino or cationic lipids of the invention have at least one protonatable or deprotonatable group, such that the lipid is positively charged at a pH at or below physiological pH (e.g. pH 7.4), and neutral at a second pH, preferably at or above physiological pH. It will, of course, be understood that the addition or removal of protons as a function of pH is an equilibrium process, and that the reference to a charged or a neutral lipid refers to the nature of the predominant species and does not require that all of the lipid be present in the charged or neutral form. Lipids that have more than one protonatable or deprotonatable group, or which are zwitterionic, are not excluded from use in the invention. In certain embodiments, the protonatable lipids have a pKa of the protonatable group in the range of about 4 to about 11, e.g., a pKa of about 5 to about 7.

[0238] The cationic lipid can comprise from about 20 mol % to about 70 or 75 mol % or from about 45 to about 65 mol % or about 20, 25, 30, 35, 40, 45, 50, 55, 60, 65, or about 70 mol % of the total lipid present in the particle. In another embodiment, the lipid nanoparticles include from about 25% to about 75% on a molar basis of cationic lipid, e.g., from about 20 to about 70%, from about 35 to about 65%, from about 45 to about 65%, about 60%, about 57.5%, about 57.1%, about 50% or about 40% on a molar basis (based upon 100% total moles of lipid in the lipid nanoparticle). In one embodiment, the ratio of cationic lipid to nucleic acid is from about 3 to about 15, such as from about 5 to about 13 or from about 7 to about 11.

[0239] Non-Cationic Lipids

[0240] The non-cationic lipid can be a neutral lipid, an anionic lipid, or an amphipathic lipid. Neutral lipids, when present, can be any of a number of lipid species which exist either in an uncharged or neutral zwitterionic form at physiological pH. Such lipids include, for example, diacylphosphatidylcholine, diacylphosphatidylethanolamine, ceramide, sphingomyelin, dihydrosphingomyelin, cephalin, and cerebrosides. The selection of neutral lipids for use in the particles described herein is generally guided by consideration of, e.g., lipid particle size and stability of the lipid particle in the bloodstream. Preferably, the neutral lipid is a lipid having two acyl groups (e.g. diacylphosphatidylcholine and diacylphosphatidylethanolamine). In one embodiment, the neutral lipids contain saturated fatty acids with carbon chain lengths in the range of C10 to C20. In another embodiment, neutral lipids with mono or diunsaturated fatty acids with carbon chain lengths in the range of C10 to C2o are used. Additionally, neutral lipids having mixtures of saturated and unsaturated fatty acid chains can be used.

[0241] Suitable neutral lipids include, but are not limited to, distearoylphosphatidylcholine (DSPC), dioleoylphosphatidylcholine (DOPC), dipalmitoylphosphatidylcholine (DPPC), dioleoylphosphatidylglycerol (DOPG), dipalmitoylphosphatidylglycerol (DPPG), dioleoyl-phosphatidylethanolamine (DOPE), palmitoyloleoylphosphatidylcholine (POPC), palmitoyloleoylphosphatidylethanolamine (POPE), dioleoyl-phosphatidylethanolamine 4-(N-maleimidomethyl)-cyclohexane-1-carboxylate (DOPE-mal), dipalmitoyl phosphatidyl ethanolamine (DPPE), dimyristoylphosphoethanolamine (DMPE), dimyristoyl phosphatidylcholine (DMPC), distearoyl-phosphatidyl-ethanolamine (DSPE), SM, 16-0-monomethyl PE, 16-O-dimethyl PE, 18-1-trans PE, 1-stearoyl-2-oleoyl-phosphatidyethanolamine (SOPE), cholesterol, or a mixture thereof. Anionic lipids suitable for use in lipid particles of the invention include, but are not limited to, phosphatidylglycerol, cardiolipin, diacylphosphatidylserine, diacylphosphatidic acid, N-dodecanoyl phosphatidylethanoloamine, N-succinyl phosphatidylethanolamine, N-glutaryl phosphatidylethanolamine, lysylphosphatidylglycerol, and other anionic modifying groups joined to neutral lipids.

[0242] The non-cationic lipid can be from about 5 mol % to about 90 mol %, about 5 mol % to about 10 mol %, about 5, 10, 15, 20, 25, 30, 35, 40, 45, 50, 55, 60, 65, 70, 75, 80, 85, or about 90 mol % of the total lipid present in the particle. In one embodiment, the lipid nanoparticles include from about 0% to about 15 or 45% on a molar basis of neutral lipid, e.g., from about 3 to about 12% or from about 5 to about 10%. For instance, the lipid nanoparticles may include about 15%, about 10%, about 7.5%, or about 7.1% of neutral lipid on a molar basis (based upon 100% total moles of lipid in the lipid nanoparticle).

[0243] Sterols

[0244] A preferred sterol is cholesterol. The sterol can be about 10 mol % to about 60 mol % or about 25 mol % to about 40 mol % of the lipid particle. In one embodiment, the sterol is about 10, 15, 20, 25, 30, 35, 40, 45, 50, 55, or about 60 mol % of the total lipid present in the lipid particle. In another embodiment, the lipid nanoparticles include from about 5% to about 50% on a molar basis of the sterol, e.g., about 15% to about 45%, about 20% to about 40%, about 48%, about 40%, about 38.5%, about 35%, about 34.4%, about 31.5% or about 31% on a molar basis (based upon 100% total moles of lipid in the lipid nanoparticle).

[0245] Aggregation Reducing Agent

[0246] The aggregation reducing agent can be a lipid capable of reducing aggregation. Examples of such lipids include, but are not limited to, polyethylene glycol (PEG)-modified lipids, monosialoganglioside Gml, and polyamide oligomers (PAO) such as those described in U.S. Pat. No. 6,320,017, which is incorporated by reference in its entirety. Other compounds with uncharged, hydrophilic, steric-barrier moieties, which prevent aggregation during formulation, like PEG, Gml or ATTA, can also be coupled to lipids. ATTA-lipids are described, e.g., in U.S. Pat. No. 6,320,017, and PEG-lipid conjugates are described, e.g., in U.S. Pat. Nos. 5,820,873, 5,534,499 and 5,885,613, each of which is incorporated by reference in its entirety.

[0247] The aggregation reducing agent may be, for example, a polyethyleneglycol (PEG)-lipid including, without limitation, a PEG-diacylglycerol (DAG), a PEG-dialkylglycerol, a PEG-dialkyloxypropyl (DAA), a PEG-phospholipid, a PEG-ceramide (Cer), or a mixture thereof (such as PEG-Cerl4 or PEG-Cer20). The PEG-DAA conjugate may be, for example, a PEG-dilauryloxypropyl (C12), a PEG-dimyristyloxypropyl (C14), a PEG-dipalmityloxypropyl (C16), or a PEG-distearyloxypropyl (C18). Other pegylated-lipids include, but are not limited to, polyethylene glycol-didimyristoyl glycerol (C14-PEG or PEG-C14, where PEG has an average molecular weight of 2000 Da) (PEG-DMG); (R)-2,3-bis(octadecyloxy)propyl-1-(methoxy poly(ethylene glycol)2000)propylcarbamate) (PEG-DSG); PEG-carbamoyl-1,2-dimyristyloxypropylamine, in which PEG has an average molecular weight of 2000 Da (PEG-cDMA); N-Acetylgalactosamine-((R)-2,3-bis(octadecyloxy)propyl-1-(methoxy poly(ethylene glycol)2000)propylcarbamate)) (GalNAc-PEG-DSG); mPEG (mw2000)-diastearoylphosphatidyl-ethanolamine (PEG-DSPE); and polyethylene glycol-dipalmitoylglycerol (PEG-DPG). In one embodiment, the aggregation reducing agent is PEG-DMG. In another embodiment, the aggregation reducing agent is PEG-c-DMA.

[0248] The average molecular weight of the PEG moiety in the PEG-modified lipids can range from about 500 to about 8,000 Daltons (e.g., from about 1,000 to about 4,000 Daltons). In one preferred embodiment, the average molecular weight of the PEG moiety is about 2,000 Daltons.

[0249] The concentration of the aggregation reducing agent may range from about 0.1 to about 15 mol %, based upon the 100% total moles of lipid in the lipid particle. In one embodiment, the formulation includes less than about 3, 2, or 1 mole percent of PEG or PEG-modified lipid, based upon the total moles of lipid in the lipid particle. In another embodiment, the lipid nanoparticles include from about 0.1% to about 20% on a molar basis of the PEG-modified lipid, e.g., about 0.5 to about 10%, about 0.5 to about 5%, about 10%, about 5%, about 3.5%, about 1.5%, about 0.5%, or about 0.3% on a molar basis (based on 100% total moles of lipids in the lipid nanoparticle).

[0250] According to a preferred embodiment, the isRNA for use in the treatment or prophylaxis of a tumor and/or cancer disease as described herein is formulated by using the isRNA as described herein and one or more liposomes, lipoplexes, or lipid nanoparticles. In one embodiment, the inventive composition comprises liposomes. Liposomes typically are artificially-prepared vesicles, which may primarily be composed of a lipid bilayer and may be used as a delivery vehicle for the administration of nutrients and pharmaceutical formulations. Liposomes can be of different sizes such as, but not limited to, a multilamellar vesicle (MLV) which may be hundreds of nanometers in diameter and may contain a series of concentric bilayers separated by narrow aqueous compartments, a small unicellular vesicle (SUV) which may be smaller than 50 nm in diameter, and a large unilamellar vesicle (LUV) which may be between 50 and 500 nm in diameter. Liposome design may include, but is not limited to, opsonins or ligands in order to improve the attachment of liposomes to unhealthy tissue or to activate events such as, but not limited to, endocytosis. Liposomes may contain a low or a high pH in order to improve the delivery of the isRNA for use in the treatment or prophylaxis of a tumor and/or cancer disease as described herein, in particular when applied as a pharmaceutical composition as described herein.

[0251] Lipid Nanoparticles (LNPs)

[0252] Preferably, lipid nanoparticles may have the structure of a liposome. A liposome is typically a structure having lipid-containing membranes enclosing an aqueous interior. Liposomes preferably have one or more lipid membranes. In preferred embodiments, liposomes can be single-layered, referred to as unilamellar, or multi-layered, referred to as multilamellar. When complexed with nucleic acids (e.g. RNA), lipid particles may also be lipoplexes, which are preferably composed of cationic lipid bilayers sandwiched between nucleic acid layers. Liposomes can further be of different sizes such as, but not limited to, a multilamellar vesicle (MLV) which may be hundreds of nanometers in diameter and may contain a series of concentric bilayers separated by narrow aqueous compartments, a small unicellular vesicle (SUV) which may be smaller than 50 nm in diameter, and a large unilamellar vesicle (LUV) which may be between 50 and 500 nm in diameter. In certain embodiments, liposome design may include, but is not limited to, opsonins or ligands in order to improve the attachment of liposomes to unhealthy tissue or to activate events such as, but not limited to, endocytosis. Liposomes may contain a low (e.g. an acidic) or a high (e.g. a basic) pH in order to improve the delivery of the pharmaceutical formulations.

[0253] As a non-limiting example, liposomes such as synthetic membrane vesicles may be prepared by the methods, apparatus and devices described in US Patent Publication No. US20130177638, US20130177637, US20130177636, US20130177635, US20130177634, US20130177633, US20130183375, US20130183373 and US20130183372, the contents of each of which are herein incorporated by reference in their entirety. In preferred embodiments, the nucleic acid (e.g. an RNA as described herein) may be encapsulated by the liposome, and/or it may be contained in an aqueous core, which may then be encapsulated by the liposome (see International Pub. Nos. WO2012031046, WO2012031043, WO2012030901 and WO2012006378 and US Patent Publication No. US20130189351, US20130195969 and US20130202684; the contents of each of which are herein incorporated by reference in their entirety).

[0254] In another embodiment, the lipid nanoparticles have a median diameter size of from about 50 nm to about 300 nm, such as from about 50 nm to about 250 nm, for example, from about 50 nm to about 200 nm. In another embodiment, nucleic acids may be delivered using smaller LNPs which may comprise a diameter from about 1 nm to about 100 nm, from about 1 nm to about 10 nm, about 1 nm to about 20 nm, from about 1 nm to about 30 nm, from about 1 nm to about 40 nm, from about 1 nm to about 50 nm, from about 1 nm to about 60 nm, from about 1 nm to about 70 nm, from about 1 nm to about 80 nm, from about 1 nm to about 90 nm, from about 5 nm to about from 100 nm, from about 5 nm to about 10 nm, about 5 nm to about 20 nm, from about 5 nm to about 30 nm, from about 5 nm to about 40 nm, from about 5 nm to about 50 nm, from about 5 nm to about 60 nm, from about 5 nm to about 70 nm, from about 5 nm to about 80 nm, from about 5 nm to about 90 nm, about 10 to about 50 nM, from about 20 to about 50 nm, from about 30 to about 50 nm, from about 40 to about 50 nm, from about 20 to about 60 nm, from about 30 to about 60 nm, from about 40 to about 60 nm, from about 20 to about 70 nm, from about 30 to about 70 nm, from about 40 to about 70 nm, from about 50 to about 70 nm, from about 60 to about 70 nm, from about 20 to about 80 nm, from about 30 to about 80 nm, from about 40 to about 80 nm, from about 50 to about 80 nm, from about 60 to about 80 nm, from about 20 to about 90 nm, from about 30 to about 90 nm, from about 40 to about 90 nm, from about 50 to about 90 nm, from about 60 to about 90 nm, from about 70 to about 80 nm, and/or from about 70 to about 90 nm.

[0255] In one embodiment, the weight ratio of lipid to RNA is at least about 0.5:1, at least about 1:1, at least about 2:1, at least about 3:1, at least about 4:1, at least about 5:1, at least about 6:1, at least about 7:1, at least about 11:1, at least about 20:1, at least about 25:1, at least about 27:1, at least about 30:1, or at least about 33:1. In one embodiment, the weight ratio of lipid to RNA is from about 1:1 to about 35:1, about 3:1 to about 15:1, about 4:1 to about 15:1, or about 5:1 to about 13:1 or about 25:1 to about 33:1. In one embodiment, the weight ratio of lipid to RNA is from about 0.5:1 to about 12:1.

[0256] According to a preferred embodiment, the isRNA for use in the treatment or prophylaxis of a tumor and/or cancer disease as described herein is administered/applied intratumorally (i.t.), locoregionally or peritumorally. As used herein, the term “intratumoral administration/application” refers to the direct delivery of a pharmaceutically active ingredient, such as the isRNA as described herein, e.g. in the form of a composition/formulation comprising the isRNA as described herein, into a tumor, adjacent to a tumor, and/or to the immediate vicinity of a tumor (peritumorally). Said delivery may be achieved by several methods known in the art, comprising but not limited to injection (such as conventional needle injection or needle-free injection, e.g. jet injection) or electroporation or combinations thereof. Methods for intratumoral delivery of drugs are described in the art (see, for instance, Brincker, 1993. Crit. Rev. Oncol. Hematol. 15(2):91-8; Celikoglu et al., 2008. Cancer Therapy 6, 545-552).

[0257] As used herein, the term ‘intratumoral’ may also refer to the administration of an active pharmaceutical ingredient to an organ bearing a tumor or cancer, or to a tissue bearing a tumor or cancer. Accordingly, the term ‘intratumoral’ as used herein may also comprise peritumoral or locoregional administration, wherein an active pharmaceutical ingredient is preferably administered to an organ or tissue proximal to the tumor or cancer, preferably to an organ or tissue, which is in direct physical contact with the tumor or cancer. In the context of the present invention, intratumoral, locoregional or peritumoral administration preferably comprises delivery (i.e. by injection) of an active pharmaceutical ingredient to a superficial tumor or cancer, or to a tumor or cancer, which is located inside of a tissue.

[0258] In some embodiments, locoregional administration of an active pharmaceutical ingredient (such as the RNA described herein) comprises delivering the active pharmaceutical ingredient to a tumor or cancer or to a tissue or organ bearing a tumor or cancer by administering the active pharmaceutical ingredient to a blood vessel (e.g. an artery, such as the liver artery, or a vein, such as the pulmonary vein) that carries the blood to the tumor or cancer or to the tissue or organ bearing the tumor or cancer.

[0259] According to a preferred embodiment, a pharmaceutically active ingredient, such as the isRNA for use in the treatment or prophylaxis of a tumor and/or cancer disease as described herein is administered intratumorally (i.t.), including locoregionally or peritumorally, wherein the administration comprises an injection technique. Therein, a pharmaceutically active ingredient, such as the isRNA for use as described herein, may preferably be injected in a single dose per treatment. Alternatively, multiple injections into the same or separate regions of the tumor or cancer or the tumor bearing organ or tissue are also envisaged. Furthermore, intratumoral administration/application includes delivery of a pharmaceutically active ingredient into one or more metastases, preferably via injection. Administration of the pharmaceutically active ingredient may be performed as single dose or repeat dose treatment with various treatment intervals, preferably as described herein.

[0260] In a preferred embodiment, a pharmaceutically active ingredient, such as the isRNA for use in the treatment or prophylaxis of a tumor and/or cancer disease as described herein is administered intratumorally, including locoregionally or peritumorally, by injection. Preferably, the intratumoral administration involves an imaging technique, which preferably enhances the precision of the administration. More preferably, such imaging technique is selected from the group consisting of computer tomograpy, ultrasound, gamma camera imaging, positron emission tomography and magnetic resonance tumor imaging. Furthermore, the intratumoral administration may preferably comprise direct intratumoral injection, which preferably involves at least one of the procedures selected from the group consisting of endoscopy, bronchoscopy, cystoscopy, colonoscopy, laparoscope and catheterization.

[0261] In a preferred embodiment, a pharmaceutically active ingredient, such as the isRNA for use in the treatment or prophylaxis of a tumor and/or cancer disease as described herein is administered locoregionally by injection. Preferably, the locoregional administration involves an imaging technique, which preferably enhances the precision of the administration, which is preferably an intratumoral or peritumoral administration as described herein. More preferably, such imaging technique is selected from the group consisting of computer tomograpy, ultrasound, gamma camera imaging, positron emission tomography and magnetic resonance tumor imaging. Furthermore, the locoregional administration may preferably comprise direct locoregional injection, which preferably involves at least one of the procedures selected from the group consisting of endoscopy, bronchoscopy, cystoscopy, colonoscopy, laparoscope and catheterization. As used herein, the term ‘locoregional administration’ may thus also refer to intratumoral or peritumoral administration, preferably injection, of a pharmaceutically active ingredient (e.g. an RNA as described herein), wherein the administration preferably involves an imaging technique, wherein the imaging technique preferably comprises at least one of the procedures selected from the group consisting of endoscopy, bronchoscopy, cystoscopy, colonoscopy, laparoscope and catheterization.

[0262] According to a preferred embodiment, the invention provides an isRNA for use in the treatment of a tumor or cancer disease,

wherein the isRNA comprises a nucleic acid sequence according to formula (I) (GₗXₘGₙ), formula (II) (CₗXₘCₙ), formula (III) (NᵤGₗXₘGₙNᵥ)ₐ or formula (IV) (NᵤCₗXₘCₙNᵥ)ₐ, preferably at least one nucleic acid sequence according to any one of SEQ ID NOs: 433 to 437 or 1014 to 1016, or a fragment or variant of any one of these sequences, more preferably according to any one of SEQ ID NOs: 433, 434, or 1014 to 1016, or a fragment or a variant of any one of these nucleic acid sequences,
wherein the isRNA is complexed with a cationic or polycationic compound, preferably with a polymeric carrier, more preferably with a polymeric carrier that is formed by a disulfide-crosslinked cationic component, which preferably comprises a peptide according to formula (V), (Va) and/or (Vb) and/or a compound according to formula (VI) (L-P1-S—[S-P2-S]ₙ—S-P3-L), more preferably at least one of the disulfide-crosslinked cationic peptides Cys-Arg₁₂, Cys-Arg₁₂-Cys, or Trp-Arg₁₂-Cys and
wherein the isRNA is preferably administered intratumorally.

[0263] According to a particularly preferred embodiment, the invention provides an isRNA for use in the treatment of a tumor or cancer disease,

wherein the isRNA comprises a nucleic acid sequence according to formula (I) (GₗXₘGₙ), formula (II) (CₗXₘCₙ), formula (III) (NᵤGₗXₘGₙNᵥ)ₐ or formula (IV) (NᵤCₗXₘCₙNᵥ)ₐ, preferably at least one nucleic acid sequence according to any one of SEQ ID NOs: 433 to 437, 1014 to 1016, or a fragment or variant of any one of these sequences, more preferably according to any one of SEQ ID NOs: 433, 434, or 1014 to 1016, or a fragment or a variant of any one of these nucleic acid sequences,
wherein the isRNA is complexed with a cationic or polycationic compound, preferably with a polymeric carrier, more preferably with a polymeric carrier that is formed by a disulfide-crosslinked cationic component, which preferably comprises a peptide according to formula (V), (Va) and/or (Vb) and/or a compound according to formula (VI) (L-P1-S—[S-P2-S]ₙ—S-P3-L), more preferably at least one of the disulfide-crosslinked cationic peptides Cys-Arg₁₂, Cys-Arg₁₂-Cys, or Trp-Arg₁₂-Cys,
wherein the isRNA is preferably administered intratumorally, and
wherein the tumor or cancer disease is preferably selected from the group consisting of melanoma, preferably advanced and/or metastatic melanoma; squamous cell cancer of the skin (SCC), preferably unresectable and/or advanced SCC; adenocystic carcinoma (ACC), preferably advanced ACC; cutaneous T-cell lymphoma, preferably advanced cutaneous T-cell lymphoma refractory to local treatment or to chemotherapy; and head and neck cancer (HNSCC), preferably advanced HNSCC. In this context, the tumor or cancer disease is preferably selected from the group consisting of advanced melanoma, preferably advanced cutaneous melanoma (cMEL), squamous cell carcinoma of the skin (SCC), preferably cutaneous squamous cell carcinoma (cSCC), squamous cell carcinoma of the head and neck (HNSCC), and adenoid cystic carcinoma (adenocystic carcinoma (ACC)).

[0264] In an alternative preferred embodiment, the tumor or the cancer disease is selected from the group consisting of advanced cutaneous melanoma (cMEL), cutaneous squamous cell carcinoma (cSCC), head and neck squamous cell carcinoma (hnSCC), and adenoid cystic carcinoma (ACC).

[0265] According to a particularly preferred embodiment, the invention provides an isRNA for use in the treatment of a tumor or cancer disease,

wherein the isRNA comprises a nucleic acid sequence according to formula (I) (GₗXₘGₙ), formula (II) (CₗXₘCₙ), formula (III) (NᵤGₗXₘGₙNᵥ)ₐ or formula (IV) (NᵤCₗXₘCₙNᵥ)ₐ, preferably at least one nucleic acid sequence according to any one of SEQ ID NOs: 433 to 437, 1014 to 1016, or a fragment or variant of any one of these sequences, more preferably according to any one of SEQ ID NOs: 433, 434; 1014 to 1016, or a fragment or a variant of any one of these nucleic acid sequences,
wherein the isRNA is complexed with a cationic or polycationic compound, preferably with a polymeric carrier, more preferably with a polymeric carrier that is formed by a disulfide-crosslinked cationic component, which preferably comprises a peptide according to formula (V), (Va) and/or (Vb) and/or a compound according to formula (VI) (L-P1-S—[S-P2-S]ₙ—S-P3-L), more preferably at least one of the disulfide-crosslinked cationic peptides Cys-Arg₁₂, Cys-Arg₁₂-Cys, or Trp-Arg₁₂-Cys,
wherein the isRNA is preferably administered intratumorally, and
wherein the tumor or cancer disease is preferably selected from the group consisting of
[0266] melanoma, preferably advanced and/or metastatic melanoma, more preferably advanced cutaneous melanoma (cMEL);
[0267] squamous cell cancer (SCC) of the skin, preferably unresectable and/or advanced SCC of the skin, more preferably cutaneous squamous cell carcinoma (cSCC), even more preferably unresectable and/or advanced cSCC;
[0268] squamous cell carcinoma of the head and neck (HNSCC), preferably advanced HNSCC, more preferably immunotherapy-refractory or platinum-refractory HNSCC, even more preferably immunotherapy-refractory advanced HNSCC or platinum-refractory advanced HNSCC;
[0269] adenocystic carcinoma (ACC), preferably advanced ACC;
[0270] cutaneous T-cell lymphoma, preferably advanced cutaneous T-cell lymphoma or cutaneous T-cell lymphoma of mycosis fungoides subtype, more preferably cutaneous T-cell lymphoma refractory to local treatment or to chemotherapy, even more preferably advanced cutaneous T-cell lymphoma refractory to local treatment or to chemotherapy, or cutaneous T-cell lymphoma of mycosis fungoides subtype refractory to local treatment or to chemotherapy, and
[0271] vulvar cancer, preferably vulvar squamous cell cancer (VSCC), more preferably advanced VSCC, even more preferably VSCC refractory to surgery or chemotherapy, most preferably advanced VSCC refractory to surgery or chemotherapy; or
   wherein the tumor or the cancer disease is preferably selected from the group consisting of cutaneous melanoma (cMEL), cutaneous squamous cell carcinoma (cSCC), head and neck squamous cell carcinoma (HNSCC), adenoid cystic carcinoma (ACC), cutaneous T-cell lymphoma, preferably cutaneous T-cell lymphoma of mycosis fungoides subtype, and vulvar squamous cell cancer (VSCC);
   wherein the tumor or the cancer disease is preferably at an advanced stage and/or refractory to standard therapy.

[0272] In certain embodiments, the isRNA as described herein is provided for use in the treatment of a tumor or cancer disease, preferably as defined herein, wherein the treatment comprises administration of at least one additional pharmaceutically active ingredient and wherein the isRNA is preferably administered intratumorally, including peritumorally or locoregionally, preferably as described herein. In particular, the present invention provides the isRNA for use in the treatment or prophylaxis of a tumor or cancer disease as described herein, wherein the treatment comprises administration of at least one additional pharmaceutically active ingredient that is conventionally used in the treatment and/or prophylaxis of a tumor or cancer disease, preferably as described herein and wherein the isRNA is preferably administered intratumorally, including peritumorally or locoregionally. In the context of the present invention, the phrase ‘pharmaceutically active ingredient that is conventionally used in the treatment and/or prophylaxis of a [tumor or cancer disease]’ preferably refers to a pharmaceutically active ingredient that is used—preferably according to standard therapy—in the treatment and/or prophylaxis of a tumor or cancer disease. More preferably, the phrase comprises a pharmaceutically active ingredient that is known in the art to be suitable for treatment and/or prophylaxis of a tumor or cancer disease.

[0273] According to a preferred embodiment, the isRNA is provided for use in the treatment of a tumor or cancer disease as described herein, wherein the treatment comprises administration of at least one additional pharmaceutically active ingredient that is conventionally used in the treatment and/or prophylaxis of the respective disease and wherein the isRNA is preferably administered intratumorally.

[0274] Even more preferably, the isRNA is provided for use in the treatment of a tumor or cancer disease selected from the group consisting of melanoma, preferably advanced and/or metastatic melanoma, most preferably advanced cutaneous melanoma (cMEL), squamous cell cancer of the skin (SCC), preferably unresectable and/or advanced SCC; most preferably preferably cutaneous squamous cell carcinoma (cSCC); adenocystic carcinoma (ACC), preferably advanced ACC; cutaneous T-cell lymphoma, preferably advanced cutaneous T-cell lymphoma refractory to local treatment or to chemotherapy; and squamous cell carcinoma of the head and neck (HNSCC), preferably advanced HNSCC, wherein the treatment comprises concomitant localized or systemic administration of at least one additional pharmaceutically active ingredient that is conventionally used in the treatment and/or prophylaxis of any of these diseases and wherein the isRNA is preferably administered intratumorally.

[0275] According to a preferred embodiment, the isRNA is provided for use in the treatment of a tumor or cancer disease selected from the group consisting of melanoma, preferably advanced and/or metastatic melanoma, more preferably advanced cutaneous melanoma (cMEL);
[0276] squamous cell cancer (SCC) of the skin, preferably unresectable and/or advanced SCC of the skin, more preferably cutaneous squamous cell carcinoma (cSCC), even more preferably unresectable and/or advanced cSCC;
[0277] squamous cell carcinoma of the head and neck (HNSCC), preferably advanced HNSCC, more preferably immunotherapy-refractory or platinum-refractory HNSCC, even more preferably immunotherapy-refractory advanced HNSCC or platinum-refractory advanced HNSCC;
[0278] adenocystic carcinoma (ACC), preferably advanced ACC;
[0279] cutaneous T-cell lymphoma, preferably advanced cutaneous T-cell lymphoma or cutaneous T-cell lymphoma of mycosis fungoides subtype, more preferably cutaneous T-cell lymphoma refractory to local treatment or to chemotherapy, even more preferably advanced cutaneous T-cell lymphoma refractory to local treatment or to chemotherapy, or cutaneous T-cell lymphoma of mycosis fungoides subtype refractory to local treatment or to chemotherapy, and
[0280] vulvar cancer, preferably vulvar squamous cell cancer (VSCC), more preferably advanced VSCC, even more preferably VSCC refractory to surgery or chemotherapy, most preferably advanced VSCC refractory to surgery or chemotherapy; or
   for use in the treatment of a tumor or cancer disease selected from the group consisting of cutaneous melanoma (cMEL), cutaneous squamous cell carcinoma (cSCC), head and neck squamous cell carcinoma (HNSCC), adenoid cystic carcinoma (ACC), cutaneous T-cell lymphoma, preferably cutaneous T-cell lymphoma of mycosis fungoides subtype, and vulvar squamous cell cancer (VSCC);
   wherein the tumor or the cancer disease is preferably at an advanced stage and/or refractory to standard therapy,
   wherein the treatment comprises concomitant localized or systemic administration of at least one additional pharmaceutically active ingredient that is conventionally used in the treatment and/or prophylaxis of any of these diseases and wherein the isRNA is preferably administered intratumorally.

[0281] The at least one additional pharmaceutically active ingredient may be administered by any suitable administration route or technique, preferably as described herein, or by intravenous, oral or local/topical application. In a preferred embodiment, the isRNA as well as the at least one additional pharmaceutically active ingredient are administered intratumorally. In a more preferred embodiment, the isRNA is administered intratumorally and at least one additional pharmaceutically active ingredient is administered systemically (oral or intravenous or subcutaneous or intramuscular or intraperitoneal or intradermal).

[0282] In some embodiments, the at least one additional pharmaceutically active ingredient is formulated together with the isRNA for use as described herein. In a particularly preferred embodiment, the at least one additional pharmaceutically active ingredient is formulated separately from the isRNA for use as described herein.

[0283] The at least one additional pharmaceutically active ingredient is not limited to a particular class of compounds. For example, the at least one additional pharmaceutically active ingredient may preferably be a compound, which is conventionally used in chemotherapy of the tumor or cancer disease, for which the isRNA as described herein is used.

[0284] Preferably, the at least one additional pharmaceutically active ingredient is a compound as described herein for use in combination with the isRNA as described herein. Alternatively, the at least one additional pharmaceutically active ingredient may preferably be a therapeutic peptide or protein (e.g. an antibody or a decoy receptor) or a fragment or variant thereof.

[0285] In some embodiments, the at least one additional pharmaceutically active ingredient is a compound, which is conventionally used in the treatment and/or prophylaxis of melanoma, preferably advanced and/or metastatic melanoma and most preferably advanced cMEL, wherein the compound is preferably selected from the group consisting of Nivolumab (Opdivo), Ipilimumab (Winglore, Yervoy), Pembrolizumab (Keytruda), dabrafenib mesylate+trametinib dimethyl sulfoxide (Tafinlar+Mekinist), temozolomide (Astromide, Temodal, Temozolomide), vemurafenib (Zelboraf), peginterferon alfa-2b (Pegintron), aldesleukin (Proleukin), bleomycin sulfate (Bleo, Bleoprim), carboplatin (Paraplatin), carmustine (Becenun, Bicnu), cisplatin (Platinol, Cisplatin, Displanor, Nuoxin), cobimetinib fumarate (Cotellic), cyclophosphamide (Endoxan), dabrafenib mesylate (Tafinlar), dacarbazine (Dacarbazine, DBL Dacarbazine, DTIC, DTIC-Dome, Dacarbazina Mayne, Dacarbazine, Dacarbazina, Detimedac, Dacarb, Celdaz, Dabaz, Dacarzine, Dacarin, Dacmed, Oncodac, Dti, Dacarbazine Sandoz, Fauldacar, Dacarex, Daczin, Arzi, Tiferomed, Acocarb, DTI, Evodazin), dactinomycin (Cosmegen, Kosmegen, Lyovac Cosmegen), diphenidol hydrochloride (Bleocina, Raamfen, Dimensal), epirubicin hydrochloride (Pharmorubicin), fotemustine (Muphoran, Mustoforan, Mustophoran, Fotemustine), hydroxyurea (Hydrine, Durea, Myelostat, Riborea, Unidrea, Hydran, Leukocel, Hydroxyurea, Hydrea, hydroxyurea), interferon alfa (Alfanative, Immunex), interferon alfa-2a (Intermax Alpha, Inron-A, Intefen, Viteron-A, Roferon A, Alferon), interferon alfa-2b (Realfa-2B, Shanferon, Intron A, Viraferon, Alfaron, Lemoron, Liveral, Recombinant Human Interferon alfa-2b, ReliFeron, Fni 2B, Infostat, Altevir, Lanstion, interferon beta (Feron), interleukin-2 (Inleusin, Recombinant Human Interleukin-2), irinotecan hydrochloride (Camptolem), lomustine (Belustine, Lomustine, Moostin), melanoma lysate vaccine (Melacine), melphalan (Alkacel, Alkeran, Melphalan), methotrexate (Methotrexate), nivolumab+ipilimumab (Opdivo+Yervoy), Sylatron (Pegintron, Sylatron), talimogene laherparepvec (Imlygic), tamoxifen citrate (Tamoxifen), temozolomide (Emzolam, Temozolomide, Temozolomide LW, Tiloshil, Temolida, Temozod, Temozolomide, Temizole), trametinib dimethyl sulfoxide (Mekinist), vincristine sulfate (Oncovin, Vincristine Sulfate, Vincristine, Fauldvincri, Eldisine), (mequinol+tretinoin) (Solage), Dacarbazine (Dacarbazine), interferon alfa (Biaferone, Isiferone), cisplatin; dacarbazine; vindesine sulfate, fibrin, sealant, tremelimumab, interferon alfa-2b, recombinant interferon alfa, imiquimod, etanercept, sorafenib tosylate; sunitinib malate, aldesleukin, imatinib mesylate; nilotinib, sargramostim, aldesleukin, ipilimumab; sargramostim, ipilimumab, pasireotide, aldesleukin; ipilimumab, vemurafenib, melphalan, cetuximab; cisplatin; cyclophosphamide; dacarbazine; docetaxel; doxorubicin; etoposide; fluorouracil; gemcitabine hydrochloride; irinotecan hydrochloride; oxaliplatin; paclitaxel; pemetrexed disodium; temozolomide, interferon alfa-2b; Sylatron, bleomycin, talimogene laherparepvec, dabrafenib mesylate; dabrafenib mesylate+trametinib dimethyl sulfoxide; trametinib dimethyl sulfoxide; vemurafenib, trametinib dimethyl sulfoxide, dabrafenib mesylate; trametinib dimethyl sulfoxide, dabrafenib mesylate, granulocyte macrophage colony stimulating factor; ipilimumab, bleomycin; undisclosed chemotherapy, ipilimumab; vemurafenib, nivolumab, bortezomib; cabozantinib s-malate; ceritinib; crizotinib; dasatinib; erlotinib hydrochloride; everolimus; gefitinib; imatinib; lapatinib ditosylate; nilotinib; olaparib; palbociclib; pazopanib hydrochloride; ramucirumab; regorafenib; sorafenib tosylate; sunitinib malate; trametinib dimethyl sulfoxide; vorinostat, bortezomib; cabozantinib s-malate; ceritinib; crizotinib; dasatinib; erlotinib hydrochloride; everolimus; gefitinib; imatinib; lapatinib ditosylate; nilotinib; olaparib; palbociclib; pazopanib hydrochloride; ramucirumab; regorafenib; sorafenib tosylate; sunitinib malate; trametinib dimethyl sulfoxide; vorinostat, aminolevulinic acid hydrochloride, dabrafenib mesylate; vemurafenib, pembrolizumab, GSK-2132231A, fotemustine, M-Vax, melphalan; tumor necrosis factor alfa, Canvaxin, aldesleukin; tumor infiltrating lymphocytes, interferon alfa-2a, talimogene laherparepvec, aldesleukin; cisplatin; dacarbazine; filgrastim; interferon alfa; vinblastine, velimogene aliplasmid, oblimersen sodium, Vaccine to Target gp100 Antigen for Metastatic Melanoma, temozolomide, velimogene aliplasmid, sorafenib tosylate, DHA-Paclitaxel, melphalan, vitespen, cisplatin; dacarbazine, peginterferon alfa-2b, lenalidomide, melanoma lysate vaccine, celecoxib, tasisulam sodium, paclitaxel albumin bound, sorafenib tosylate, aldesleukin; histamine dihydrochloride, Canvaxin, sorafenib tosylate, GM2-KLH Vaccine+QS21, elesclomol; paclitaxel, peginterferon alfa-2b, BMS-734019; ipilimumab, aldesleukin; cisplatin; dacarbazine; filgrastim; vinblastine, aldesleukin; cisplatin; dacarbazine; interferon alfa-2b; vinblastine sulfate, dacarbazine; oblimersen sodium, bevacizumab, oblimersen sodium, cisplatin; cytarabine; paclitaxel; treosulfan, Vaccine for Melanoma, melphalan; recombinant tumor necrosis factor, GM2-KLH vaccine; QS-21, Polyvalent Melanoma Vaccine+BCG Vaccine, aldesleukin; cisplatin; dacarbazine; interferon alfa; vinblastine, temozolomide, interferon gamma; melphalan; tumor necrosis factor alfa, Cellular Immunotherapy for Melanoma, retinol, interferon alfa-2a, Corynebacterium granulosum P40, melphalan, cisplatin, bacillus calmette-guerin vaccine; cyclophosphamide, aldesleukin; cisplatin; dacarbazine; interferon alfa; vinblastine, ranibizumab, interferon alfa, bacillus calmette-guerin vaccine, bacillus calmette-guerin vaccine, melphalan, interferon alfa, megestrol, interferon alpha-2, cisplatin; dacarbazine, bacillus calmette-guerin vaccine; dacarbazine, aldesleukin; lisofylline, dabrafenib mesylate, cyclophosphamide; dactinomycin; vincristine, bacillus calmette-guerin vaccine, bacillus calmette-guerin vaccine; dacarbazine, trametinib dimethyl sulfoxide, PV-10, cholecalciferol, timolol maleate, masitinib, fotemustine; interferon alfa-2b, talimogene laherparepvec, sodium biselenite, cisplatin; dacarbazine; vindesine, isotretinoin, Sylatron, fotemustine, seviprotimut-L, dabrafenib mesylate; trametinib dimethyl sulfoxide, peginterferon alfa-2a, aldesleukin; isotretinoin; peginterferon alfa-2b, dabrafenib mesylate; trametinib dimethyl sulfoxide, cobimetinib fumarate; vemurafenib, interferon alfa-2b; M-Vax, nivolumab, dacarbazine; paclitaxel, M-200, cholecalciferol, binimetinib, melphalan, sargramostim, pembrolizumab, gene therapy for malignant melanoma, eltrapuldencel-T, binimetinib; encorafenib, sargramostim; tyrosinase peptide vaccine, pembrolizumab; talimogene laherparepvec, autologous tumor-infiltrating lymphocytes, talimogene laherparepvec, dabrafenib mesylate; ipilimumab; nivolumab; trametinib dimethyl sulfoxide, aldesleukin; cyclophosphamide; fludarabine; tumor infiltrating lymphocytes, PV-10, talimogene laherparepvec, HM-95573, dabrafenib mesylate; trametinib dimethyl sulfoxide, interferon beta, ipilimumab; nivolumab, Darleukin; Fibromun, LN-144, binimetinib, epacadostat; pembrolizumab, oblimersen sodium, agatolimod sodium, lenalidomide, interferon alfa-2a; peginterferon alfa-2a, CSF-470, Melanoma vaccine modified to express HLA A2/4-1BB ligand (Cellular Immunotherapy for Metastatic Melanoma), ipilimumab; nivolumab; sargramostim, ImmuniCell (Cellular Immunotherapy for Cancer and Viral Infections), trabedersen, BTH-1677, trametinib dimethyl sulfoxide, melphalan (Melblez), AS15+recMAGE-A3, binimetinib, binimetinib+encorafenib, Cellular Immunotherapy for Cancer and Viral Infections, CSF-470, dabrafenib mesylate (Tafinlar), dabrafenib mesylate+trametinib dimethyl sulfoxide, Darleukin, encorafenib, epacadostat, masitinib, PV-10, Sargramostim (Leukine), seviprotimut-L, trabedersen, Vaccine for Breast Cancer, Melanoma and Soft Tissue Sarcoma and Vemurafenib (Zelboraf).

[0286] In particularly preferred embodiments, the at least one additional pharmaceutically active ingredient is a compound, which is conventionally used in the treatment and/or prophylaxis of melanoma, preferably advanced and/or metastatic melanoma and most preferably advanced cMEL, wherein the compound is a PD-1 inhibitor, preferably an antagonistic PD-1 antibody, preferably selected from the group consisting of Nivolumab (Opdivo), and Pembrolizumab (Keytruda).

[0287] In certain embodiments, the at least one additional pharmaceutically active ingredient is a compound, which is conventionally used in the treatment and/or prophylaxis of squamous cell cancer of the skin (SCC), preferably unresectable and/or advanced SCC, wherein the compound is preferably selected from the group consisting of Cetuximab (Erbitux), paclitaxel albumin bound (Abraxane), (gimeracil+oteracil+tegafur) (TS-1), Docetaxel (Docetaxel, Doxel, Taxotere, Docetaxel An, Docel, Nanoxel M, Tautax, Docetaxel-AS, Docetaxel-M, Qvidadotax, Relidoce, Taxelo, Oncodocel, Doxotel, Pacancer, Docetrust, Dodetax, Dodabur, Soulaxcin, Taxedol, Docefim, Docetaxel, Ribodocel, Critidoc, Asodoc, Chemodoc, Docelibbs, Docenat, Dincilezan, Dostradixinol, Docefrez, Camitotic, Oncotaxel, Somatixel, Belotaxel, Qvidadotax, Taxceus, Cetadocure, Docetaxel CT, Tevaxter, Docirena, Eurotere, Axtere, Celotax, Taxanit, Drobanos, Cetado, Doxocad, Taxceus, Egidox, Tedocad, Docecad, Docelex, Docetax, Docetaxel, Docetere, Dotax, Taxuba, Monotaxel, Taceedo, Detaxl, Docet, Docetaxel, Ferdotax, Wintaxel), (tegafur+uracil) (Uft, Uft E, Tefudex, Unitoral, Luporal, Tagracil), Fluorouracil (5-FU), (gimeracil+oteracil+tegafur) ODT (TS-1 Combination OD), bleomycin sulfate (Tecnomicina, Cinaleo, Bleomycin, Bloicin-S, Bonar, Bleocin, Bleomycin Sulfate, Bleo, Bleocel, Bleotex, Oncobleo, Bleonco, Bleosol, Lyoble, Bleomycin Sulfate, Blenamax, Bleomycin, Blenoxane, Bleomicina, Bleomycine Bellon, Bleoprim), carboplatin (Carboplatin, Platamine CS, Carbaccord, Carboplatina, Carboplatino, Paraplatin, Carbosin, Tecnocarb, Carbomerck, Paract, Carboplatine CTRS, Carboplatine Intsel Chimos, Carboplatin, Carbokem, Carbotinol, Fauldcarbo, Evocarb, Citoplatina, Platin), ciprofloxacin (Hypoflox, Ufexil), ciprofloxacin hydrochloride (Ciprofloxacin Pharma, Prodin, Ciproxin), cisplatin (Cisplatin, Stritin, Ifapla, Accocit, Unistin, Cancertin, Cisplan, Citoplax, Nuoxin, Placis, Cisplatino, Displanor, Randa, Cispla, Fauldcispla, Briplatin, Platinex, Platinol, Platinex, Riboplatin, Cisplatine, Platistine CS, Platosin, Accocit, Cisplatino) cyclophosphamide (Endoxan, Cyclophosphamide), doxifluridine (Doxifluridine, May Vladimir), doxorubicin (Doxorubicin Hydrochloride, Adriamycin RDF, Doxorubicin, Doxorubicin PFS), epirubicin, hydrochloride (Brecila, Cloridrato De Epirrubicina, Epirubicin, Farmorubicina, Nuovodox, Adnexa, 4-Eppedo, Favicin), fluorouracil (Agicil, Fluorouracil, Fauldfluor, Oncourcil, Flocil, 5 Flucel), folic acid+methotrexate (Truxofol), human adenovirus type 5 (recombinant) (Oncorine), hydroxyurea (Oxyrea, Durea, Myelostat, Riborea, Unidrea, Ondrea, Hydran, Leukocel, Hydroxyurea, Hydrea), ifosfamide (Holoxan, Ifosfamide EG), levamisole (Zirsol), methotrexate Methotrexate (Tratoben, Methotrexate, Fresexate, Neometho, Fauldmetro, Methotrexate Sodium, Methocel, Hytas, Methaccord, Methofill, Metotrexato, Traxacord, Plastomet, Tevatrex, Metrex, Caditrex, Carditrex, Vibzi, Imutrex, Biotrexate, Methorex, Mexate, Neotrexate, Oncotrex, Remtrex, Trixilem, Hi-Trex, Metorex, Trex, Unitrexate, Ebetrexac, Fauldexato, Lantarel, Maxtrex, Miantrex CS, Rheumatrex, Folex, Folex PFS, Abitrexate, Tevametho, Trexall, Emthexate, Abitrexate, Meadow), mitomycin (Mitomycin C, Mitomycin, Mitonco, Lyomit), nedaplatin (Jiebaishu, Aoxianda, Aqupla), nimesulide (Nimulid), nimotuzumab (Biomab EGFR, Laedemab), nitrofurantoin (Furatsilin), ofloxacin (Entof), paclitaxel (Paclitaxel, Taxol), peplomycin sulfate (Pepleo), picibanil (Picibanil), pirarubicin (Pirarubicin Hydrochloride, Therarubicin, Pinorubin), sodium glycididazole (CMNa), tegafur (Utefos, Icarus, Futraful, Tegafur Gimeracil Oteracil Potassium), temoporfin (Foscan), topotecan hydrochloride (Topotecan), ubenimex (Ubenimex), vinblastine sulfate (Vinblastine, Vblastin), vincristine sulfate (Vincristine, Vincristine Sulfate, Vincristin, Sutivin, vindesine sulfate (Eldisine), carboplatin (Carboplatine Qualimed, Carboplatine, Carboplatino, Carboplatin), cisplatin (Cisplatin), docetaxel (Kamdocon, Naltoxater, Docetaxel), fluorouracil (Fluorouracil, Fluorouracile, Fluorouracil), methotrexate (Methotrexate Sodium, Mexate, Mexate Aq, Biometrox, Medsatrexate, Otaxem), vincristine sulfate (Oncovin), fluorouracil, sunitinib malate, acitretin, fibrin sealant, cetuximab, cetuximab, erlotinib, cisplatin; docetaxel; fluorouracil, undisclosed anti-cancer drug, gefitinib, pravastatin sodium, sirolimus, undisclosed chemotherapy, cisplatin; docetaxel; fluorouracil, sirolimus, fluorouracil; undisclosed taxane, methyl aminolevulinate hydrochloride, cisplatin; docetaxel; fluorouracil, erlotinib hydrochloride, cetuximab, imiquimod, undisclosed Chinese herbal medicine, aspirin; enalapril maleate, undisclosed chemotherapy, cetuximab, (gimeracil+oteracil+tegafur); carboplatin; cisplatin, cisplatin; fluorouracil; nimotuzumab, carboplatin; paclitaxel albumin bound, cisplatin; nedaplatin, bleomycin, nedaplatin, cisplatin; paclitaxel, paclitaxel albumin bound, (gimeracil+oteracil+tegafur), bleomycin; undisclosed chemotherapy, apatinib; docetaxel, undisclosed immunomodulatory supplement, BCM-95, aminolevulinic acid hydrochloride, nedaplatin, cisplatin; palifermin, cetuximab, gefitinib, bevacizumab, belagenpumatucel-L, cisplatin; tirapazamine, cisplatin; tirapazamine, cisplatin; gemcitabine; paclitaxel; topotecan; vinorelbine, cisplatin; fluorouracil, panitumumab, carboplatin; docetaxel; gemcitabine hydrochloride; vinorelbine tartrate, amifostine; fluorouracil, cisplatin; fluorouracil, carboplatin; paclitaxel, tirapazamine, cisplatin; epoetin alfa, figitumumab, melphalan; tumor necrosis factor alf, cisplatin, cisplatin; fluorouracil, cisplatin; undisclosed chemotherapy, docetaxel, contusugene ladenovec, cisplatin; fluorouracil; paclitaxel, docetaxel, human papillomavirus [serotypes 16, 18] (bivalent) vaccine, isotretinoin, cisplatin; fluorouracil, misonidazole, paclitaxel, palifermin, endostatin, pilocarpine, cisplatin; docetaxel; filgrastim; fluorouracil; paclitaxel, cisplatin; docetaxel; filgrastim; fluorouracil; paclitaxel, cisplatin; irinotecan hydrochloride, cisplatin; gemcitabine, cisplatin; epirubicin; fluorouracil; undisclosed chemotherapy, methyl aminolevulinate hydrochloride, carboplatin; paclitaxel, carbogen; carbon dioxide; niacinamide, cisplatin; fluorouracil, talimogene laherparepvec, epoetin alfa, cisplatin; fluorouracil; panitumumab, cisplatin; fluorouracil, cisplatin; fluorouracil, aldesleukin, cisplatin; fluorouracil, cisplatin; paclitaxel, cisplatin; fluorouracil, fluorouracil; leucovorin; lobaplatin, cisplatin, cisplatin; ethyl mercaptan; ifosfamide; mesna; mitolactol, doxorubicin; levamisole, (tegafur+uracil), cisplatin; fluorouracil, cisplatin; vinorelbine, carboplatin; cisplatin; gemcitabine hydrochloride, Corynebacterium parvum; doxorubicin, capecitabine; cisplatin; fluorouracil; paclitaxel, fluorouracil; leucovorin; methotrexate, rAd-p53, cetuximab; cisplatin; docetaxel, PV-10, methyl aminolevulinate hydrochloride, cisplatin; fluorouracil, paclitaxel; topotecan hydrochloride, carboplatin; cisplatin; paclitaxel, cisplatin; topotecan hydrochloride, cisplatin; etoposide, docetaxel; fluorouracil, aspirin, cisplatin; gemcitabine, Lactobacillus brevis CD2, cisplatin; docetaxel, fosbretabulin tromethamine, panitumumab, fluorouracil, paclitaxel, carboplatin; cisplatin; docetaxel; fluorouracil, fluorouracil, erlotinib hydrochloride, cisplatin; undisclosed chemotherapy; vinorelbine, (gimeracil+oteracil+tegafur); carboplatin, cetuximab, contusugene ladenovec, cetuximab, methyl aminolevulinate hydrochloride, cyclophosphamide, (gimeracil+oteracil+tegafur); cisplatin, paclitaxel albumin bound, carboplatin; paclitaxel, cisplatin; gemcitabine, capecitabine; cisplatin, docetaxel, Z-100, cisplatin; ifosfamide; paclitaxel, nimotuzumab, irinotecan hydrochloride, celecoxib; methotrexate, Nutrison, carboplatin; cisplatin; fluorouracil; paclitaxel, cisplatin; paclitaxel, cisplatin; docetaxel; vinorelbine, paclitaxel, (gimeracil+oteracil+tegafur); cisplatin, carboplatin; paclitaxel, methyl aminolevulinate hydrochloride, Aibin, cisplatin; fluorouracil, porfimer sodium, carboplatin; cisplatin; tocotrienol; vinorelbine, (gimeracil+oteracil+tegafur); cisplatin; paclitaxel, docetaxel, ipilimumab, cisplatin, VB-4847, celecoxib; thalidomide, cisplatin; epirubicin; fluorouracil, cisplatin; fluorouracil, fluorouracil, carboplatin; paclitaxel, cetuximab; cisplatin; docetaxel, autologous cytokine induced killer cells, cisplatin; docetaxel; fluorouracil, cisplatin; epirubicin; fluorouracil, tergenpumatucel-L, cetuximab; cisplatin; docetaxel, Elental, cisplatin; nimotuzumab; paclitaxel, eicosapentaenoic acid; undisclosed nutritional supplement, palbociclib, pembrolizumab (Keytruda), nimotuzumab, apatorsen and dacomitinib.

[0288] In particularly preferred embodiments, the at least one additional pharmaceutically active ingredient is a compound, which is conventionally used in the treatment and/or prophylaxis of squamous cell cancer of the skin (SCC), preferably unresectable and/or advanced SCC, wherein the compound is a PD-1 inhibitor, preferably an antagonistic PD-1 antibody, preferably selected from the group consisting of Nivolumab (Opdivo), and Pembrolizumab (Keytruda).

[0289] In some embodiments, the at least one additional pharmaceutically active ingredient is a compound, which is conventionally used in the treatment and/or prophylaxis of squamous cell carcinoma of the head and neck (HNSCC), preferably advanced HNSCC, wherein the compound is preferably selected from the group consisting of Nivolumab, Cetuximab (Erbitux), paclitaxel albumin bound (Abraxane), gimeracil+oteracil+tegafur (TS-1), docetaxel (Docetaxel, Doxel, Taxotere, Docetaxel An, Nanoxel M, Tautax, Docetaxel-AS, Docetaxel-M, Qvidadotax, Relidoce, Taxelo, Oncodocel, Doxotel, Pacancer, Docetrust, Dodetax, Dodabur, Soulaxcin, Taxedol, Docefim, Ribodocel, Critidoc, Asodoc, Chemodoc, Docelibbs, Docenat, Dincilezan, Dostradixinol, Docefrez, Camitotic, Oncotaxel, Somatixel, Belotaxel, Qvidadotax, Taxceus, Cetadocure, Docetaxel CT, Tevaxter, Docirena, Eurotere, Axtere, Celotax, Taxanit, Drobanos, Cetado, Doxocad, Taxceus, Egidox, Tedocad, Docecad, Docelex, Docetax, Docetere, Dotax, Taxuba, Monotaxel, Taceedo, Detaxl, Docet, Ferdotax, Wintaxel, Kamdocon, Naltoxater), tegafur+uracil (Uft, Uft E, tefudex, Unitoral, Luporal Tagracil), fluorouracil (bn: 5-FU, Fluorouracil, Fluorouracile), gimeracil+oteracil+tegafur ODT (bn TS-1 Combination OD), bleomycin sulfate (Tecnomicina, Cinaleo, Bleomycin, Bloicin-S, Bonar, Bleocin, Bleo Bleomycin Sulfate, Bleocel, Bleotex, Oncobleo, Bleonco, Bleosol, Lyoble, Bleomycin Sulfate, Blenamax, Blenoxane, Bleomicina Bleomycine Bellon Bleoprim), carboplatin (Carboplatin Platamine CS Carbaccord Carboplatina Carboplatino Paraplatin Carbosin Tecnocarb Carbomerck, Paract, Carboplatine CTRS, Carboplatine Intsel Chimos, Carbokem Carbotinol Fauldcarbo, Evocarb, Citoplatina, Platin, Carboplatine Qualimed, Carboplatine, Carboplatino, Carboplatin), ciprofloxacin (Hypoflox, Ufexil), ciprofloxacin hydrochloride (Ciprofloxacin Pharma, Prodin, Ciproxin), cisplatin (Cisplatin, Stritin, Ifapla, Accocit, Unistin, Cancertin, Cisplan, Citoplax, Nuoxin, Placis, Cisplatino, Displanor, Cisplatine, Randa, Cisplatin, Cispla, Fauldcispla, Briplatin, Platinex, Platinol, Riboplatin, Platistine CS, Platosin, Accocit), cyclophosphamide (Endoxan, Cyclophosphamide), doxifluridine (Doxifluridine, May Vladimir, Doxifluridine), doxorubicin (Doxorubicin Hydrochloride, Adriamycin RDF, Doxorubici, Doxorubicin Hydrochloride, Doxorubicin PFS), epirubicin hydrochloride (Brecila, Cloridrato De Epirrubicina, Epirubicin, Farmorubicina, Nuovodox, Adnexa, 4-Eppedo, Favicin), fluorouracil (Agicil, Fluorouracil, Fauldfluor, Oncourcil Flocil, 5 Flucel), folic acid+methotrexate (Truxofol), human adenovirus type 5 (recombinant) (Oncorine), hydroxyurea (Oxyrea, Durea, Myelostat, Riborea, Unidrea, Ondrea, Hydran, Leukocel, Hydroxyurea, Hydrea), ifosfamide (Holoxan, Ifosfamide EG), levamisole (Zirsol), methotrexate (Tratoben, Methotrexate, Fresexate, Neometho, Fauldmetro, Methotrexate Sodium, Methocel, Hytas, Methaccord, Methofill, Metotrexato, Traxacord, Plastomet, Tevatrex, Metrex, Caditrex, Carditrex, Vibzi, Imutrex, Biotrexate, Methorex, Mexate, Neotrexate, Oncotrex, Remtrex, Trixilem, Hi-Trex, Metorex, Trex, Unitrexate, Ebetrexac, Fauldexato, Lantarel, Maxtrex, Miantrex CS, Rheumatrex, Folex, Folex PFS, Abitrexate, Trexall, Emthexate, Abitrexate, Meadow, Mexate Aq, Biometrox, Otaxem), Mitomycin (Mitomycin C, Mitomycin, Mitonco, Lyomit), Nedaplatin (Jiebaishu, Aoxianda, Aqupla), Nimesulide (Nimulid), Nimotuzumab (Biomab EGFR, Laedemab), Nitrofurantoin (Furatsilin), Ofloxacin (Entof), Paclitaxel (Paclitaxel, Taxol), peplomycin sulfate (Pepleo), picibanil (Picibanil), pirarubicin (Pirarubicin Hydrochloride, Therarubicin, Pinorubin), sodium glycididazole (CMNa), tegafur (Utefos, Icarus, Futraful, Tegafur Gimeracil Oteracil Potassium), temoporfin (Foscan), topotecan hydrochloride (Topotecan), ubenimex (Ubenimex), vinblastine sulfate (Vinblastine, Vblastin, Vincristine, Vincristine Sulfate, Vincristin, Sutivin, Vincrisan, Eldisine), vincristine sulfate (Oncovin), gefitinib, escitalopram oxalate, Gene Therapy to Activate p53 for Oncology, cevimeline hydrochloride, docetaxel; lenograstim, bortezomib; docetaxel; irinotecan, carboplatin; paclitaxel, cisplatin; docetaxel; fluorouracil, human papillomavirus vaccine (Vaccination Against Human Papillomavirus Types 16 and 18 and Unvaccinated Controls), carboplatin; cisplatin; paclitaxel, undisclosed epidermal growth factor receptor inhibitor, cetuximab, sorafenib tosylate; sunitinib malate, amifostine, cisplatin; dexamethasone; docetaxel; metoclopramide, platinum based chemotherapy, cetuximab; nimotuzumab, nimotuzumab, dobutamine hydrochloride; dopexamine hydrochloride; epinephrine; norepinephrine bitartrate, cetuximab; cisplatin, cetuximab; cisplatin; docetaxel; fluorouracil, cisplatin; paclitaxel, Gendicine, Doce onkovis (Docetaxel), Picibanil, docetaxel; Iobaplatin, oxytetracycline hydrochloride, cisplatin; mitomycin, bleomycin, nimotuzumab, cisplatin; fluorouracil; nimotuzumab, cetuximab; cisplatin; cyclophosphamide; dacarbazine; docetaxel; doxorubicin; etoposide; fluorouracil; gemcitabine hydrochloride; irinotecan hydrochloride; oxaliplatin; paclitaxel; pemetrexed disodium; temozolomide, varenicline, acetylcysteine, dopamine; norepinephrine, (gimeracil+oteracil+tegafur), nimotuzumab, icotinib hydrochloride, Kushen (kuh-seng), Carboxymethylpachymaran, BCM-95, Lactofos, Pegfilgrastim, methadone, Varanadi ghrita, cisplatin; palifermin, cetuximab, cisplatin; lapatinib ditosylate, gefitinib, zalutumumab, erlotinib hydrochloride, beta carotene; E-Tabs, bevacizumab, levothyroxine; liothyronine sodium; recombinant human thryroid stimulating hormone, cisplatin; docetaxel; fluorouracil; hydroxyurea, fluorouracil, docetaxel; St. John's Wort, carboplatin; cisplatin; fluorouracil; paclitaxel, Biafine, methotrexate, cisplatin; fluorouracil, alpha tocopherol; isotretinoin; recombinant interferon alfa, panitumumab, cisplatin, bleomycin; fluorouracil; leucovorin; methotrexate; vincristine, nimotuzumab, panitumumab, amifostine; fluorouracil, cisplatin; docetaxel; fluorouracil, capecitabine; cisplatin; fluorouracil, pemetrexed disodium, cisplatin; gemcitabine, tranexamic acid, carboplatin; fluorouracil, cefazolin, epoetin alfa, tirapazamine, erlotinib hydrochloride, cetuximab; docetaxel; fluorouracil, megestrol, contusugene ladenovec, cevimeline hydrochloride, cisplatin; fluorouracil, cisplatin; fluorouracil; paclitaxel, isotretinoin, porfiromycin, escitalopram oxalate, gimeracil+oteracil+tegafur, IntraDose (Cisplatin Plus Epinephrine), misonidazole, tirapazamine, carboplatin; cisplatin; docetaxel; fluorouracil, gefitinib, epoetin alfa, paclitaxel, gefitinib, palifermin, pilocarpine, celecoxib, cisplatin; docetaxel; filgrastim; fluorouracil; paclitaxel, cisplatin; fluorouracil; leucovorin, cisplatin; gemcitabine; mannitol, Lactobacillus brevis CD2, Glutamine, carbogen; niacinamidem, cetuximab; cisplatin; docetaxel; fluorouracil, carbogen; carbon dioxide; niacinamide, cisplatin; docetaxel; fluorouracil, Soluble Beta Glucan, contusugene ladenovec, zalutumumab, talimogene laherparepvec, sucralfate, doxepin, methotrexate, amifostine, capsaicin, cisplatin; fluorouracil; panitumumab, aldesleukin, tranexamic acid, zinc sulfate, bacillus calmette-guerin [connaught] vaccine; bleomycin; cyclophosphamide; fluorouracil; methotrexate, amifostine, fluorouracil; hydroxyurea, bacitracin; clotrimazole; gentamicin, cyclophosphamide; doxorubicin, pelareorep, filgrastim, enteral nutrition, pentoxifylline, epirubicin; fluorouracil; leucovorin; mitomycin, porfiromycin, bleomycin; cisplatin; methotrexate; vincristine, bacillus calmette-guerin vaccine; isoniazid; methotrexate, fluorouracil; leucovorin; methotrexate, rAd-p53, PV-10, Leukocyte Interleukin, nimotuzumab, afatinib dimaleate, afatinib dimaleate; cisplatin, carboplatin; cetuximab; fluorouracil, cetuximab; cisplatin, nedaplatin, docetaxel; fluorouracil, nimorazole, gemcitabine hydrochloride, afatinib dimaleate, nedaplatin, contusugene ladenovec, Lactobacillus brevis CD2, cetuximab, nimotuzumab, E-10A, cisplatin; gemcitabine, cisplatin; lobaplatin, endostatin (recombinant)_dapsone; doxycycline; minocycline, carboplatin; cyclophosphamide; docetaxel; doxorubicin; paclitaxel, nivolumab, pelareorep, autologous stem cells; carboplatin; etoposide; ifosfamide, vinflunine ditartrate, gemcitabine, cisplatin; fluorouracil; mitomycin, porfiromycin, Olimel, pembrolizumab, AminoPure, nedaplatin, Liang Ge San, eicosapentaenoic acid, celecoxib; methotrexate, cisplatin; pembrolizumab, (tegafur+uracil); cisplatin; epirubicin; mitomycin, durvalumab; tremelimumab, sodium hypochlorite, cetuximab; cisplatin, cisplatin; paclitaxel, amcasertib, capecitabine, R-TPR-033, VB-4847, gabapentin, raltitrexed, cisplatin; fluorouracil; leucovorin, cisplatin; docetaxel, celecoxib, durvalumab; durvalumab+tremelimumab, TT-10, (sodium alginate+sodium carbonate+propolis+aloe vera+calendula+honey+chamomile); cisplatin, pembrolizumab; talimogene laherparepvec, avelumab, nimorazole, eicosapentaenoic acid, lovastatin, dexamethasone; etoposide; gemcitabine; pegaspargase, ipilimumab; nivolumab, cetuximab; cisplatin; nivolumab, capecitabine; cisplatin; docetaxel, isotretinoin, carboplatin; cisplatin; gemcitabine; paclitaxel, erlotinib hydrochloride, VB-4847 (Proxinium Plus Best Supportive Care), celecoxib; thalidomide, cisplatin; fluorouracil, curcumin, celecoxib, imiquimod, cisplatin; cyclophosphamide; etoposide, sotatercept, cisplatin; docetaxel; fluorouracil, cetuximab; cisplatin; docetaxel, human endostatin, melatonin, epigallocatechin gallate, cisplatin; gemcitabine, gemcitabine; paclitaxel, (gimeracil+oteracil+tegafur), eicosapentaenoic acid; undisclosed nutritional supplement, celecoxib; methotrexate, pembrolizumab (Keytruda), afatinib dimaleate, cetuximab (Erbitux), durvalumab, durvalumab+tremelimumab, E-10A, entrectinib, Leukocyte Interleukin (Multikine), nimotuzumab, nivolumab (Opdivo), pelareorep (Reolysin), TT-10, vinflunine ditartrate (Javlor), acalabrutinib, AlloVax and alpelisib.

[0290] In particularly preferred embodiments, the at least one additional pharmaceutically active ingredient is a compound, which is conventionally used in the treatment and/or prophylaxis of squamous cell carcinoma of the head and neck (HNSCC), preferably advanced HNSCC, wherein the compound is a PD-1 inhibitor, preferably an antagonistic PD-1 antibody, preferably selected from the group consisting of Nivolumab, and Pembrolizumab (Keytruda).

[0291] In some embodiments, the at least one additional pharmaceutically active ingredient is a compound, which is conventionally used in the treatment and/or prophylaxis of adenocystic carcinoma (ACC), preferably advanced ACC, wherein the compound is preferably selected from the group consisting of Nivolumab, Cetuximab (Erbitux), paclitaxel albumin bound (Abraxane), gimeracil+oteracil+tegafur (TS-1), docetaxel (Docetaxel, Doxel, Taxotere, Docetaxel An, Nanoxel M, Tautax, Docetaxel-AS, Docetaxel-M, Qvidadotax, Relidoce, Taxelo, Oncodocel, Doxotel, Pacancer, Docetrust, Dodetax, Dodabur, Soulaxcin, Taxedol, Docefim, Ribodocel, Critidoc, Asodoc, Chemodoc, Docelibbs, Docenat, Dincilezan, Dostradixinol, Docefrez, Camitotic, Oncotaxel, Somatixel, Belotaxel, Qvidadotax, Taxceus, Cetadocure, Docetaxel CT, Tevaxter, Docirena, Eurotere, Axtere, Celotax, Taxanit, Drobanos, Cetado, Doxocad, Taxceus, Egidox, Tedocad, Docecad, Docelex, Docetax, Docetere, Dotax, Taxuba, Monotaxel, Taceedo, Detaxl, Docet, Ferdotax, Wintaxel, Kamdocon, Naltoxater), tegafur+uracil (Uft, Uft E, tefudex, Unitoral, Luporal Tagracil), fluorouracil (bn: 5-FU, Fluorouracil, Fluorouracile), gimeracil+oteracil+tegafur ODT (bn TS-1 Combination OD), bleomycin sulfate (Tecnomicina, Cinaleo, Bleomycin, Bloicin-S, Bonar, Bleocin, Bleo Bleomycin Sulfate, Bleocel, Bleotex, Oncobleo, Bleonco, Bleosol, Lyoble, Bleomycin Sulfate, Blenamax, Blenoxane, Bleomicina, Bleomycine Bellon Bleoprim), carboplatin (Carboplatin Platamine CS Carbaccord Carboplatina Carboplatino Paraplatin Carbosin Tecnocarb Carbomerck, Paract, Carboplatine CTRS, Carboplatine Intsel Chimos, Carbokem Carbotinol Fauldcarbo, Evocarb, Citoplatina, Platin, Carboplatine Qualimed, Carboplatine, Carboplatino, Carboplatin), ciprofloxacin (Hypoflox, Ufexil), ciprofloxacin hydrochloride (Ciprofloxacin Pharma, Prodin, Ciproxin), cisplatin (Cisplatin, Stritin, Ifapla, Accocit, Unistin, Cancertin, Cisplan, Citoplax, Nuoxin, Placis, Cisplatino, Displanor, Cisplatine, Randa, Cisplatin, Cispla, Fauldcispla, Briplatin, Platinex, Platinol, Riboplatin, Platistine CS, Platosin, Accocit), cyclophosphamide (Endoxan, Cyclophosphamide), doxifluridine (Doxifluridine, May Vladimir, Doxifluridine), doxorubicin (Doxorubicin Hydrochloride, Adriamycin RDF, Doxorubici, Doxorubicin Hydrochloride, Doxorubicin PFS), epirubicin hydrochloride (Brecila, Cloridrato De Epirrubicina, Epirubicin, Farmorubicina, Nuovodox, Adnexa, 4-Eppedo, Favicin), fluorouracil (Agicil, Fluorouracil, Fauldfluor, Oncourcil Flocil, 5 Flucel), folic acid+methotrexate (Truxofol), human adenovirus type 5 (recombinant) (Oncorine), hydroxyurea (Oxyrea, Durea, Myelostat, Riborea, Unidrea, Ondrea, Hydran, Leukocel, Hydroxyurea, Hydrea), ifosfamide (Holoxan, Ifosfamide EG), levamisole (Zirsol), methotrexate (Tratoben, Methotrexate, Fresexate, Neometho, Fauldmetro, Methotrexate Sodium, Methocel, Hytas, Methaccord, Methofill, Metotrexato, Traxacord, Plastomet, Tevatrex, Metrex, Caditrex, Carditrex, Vibzi, Imutrex, Biotrexate, Methorex, Mexate, Neotrexate, Oncotrex, Remtrex, Trixilem, Hi-Trex, Metorex, Trex, Unitrexate, Ebetrexac, Fauldexato, Lantarel, Maxtrex, Miantrex CS, Rheumatrex, Folex, Folex PFS, Abitrexate, Trexall, Emthexate, Abitrexate, Meadow, Mexate Aq, Biometrox, Otaxem), Mitomycin (Mitomycin C, Mitomycin, Mitonco, Lyomit), Nedaplatin (Jiebaishu, Aoxianda, Aqupla), Nimesulide (Nimulid), Nimotuzumab (Biomab EGFR, Laedemab), Nitrofurantoin (Furatsilin), Ofloxacin (Entof), Paclitaxel (Paclitaxel, Taxol), peplomycin sulfate (Pepleo), picibanil (Picibanil), pirarubicin (Pirarubicin Hydrochloride, Therarubicin, Pinorubin), sodium glycididazole (CMNa), tegafur (Utefos, Icarus, Futraful, Tegafur Gimeracil Oteracil Potassium), temoporfin (Foscan), topotecan hydrochloride (Topotecan), ubenimex (Ubenimex), vinblastine sulfate (Vinblastine, Vblastin, Vincristine, Vincristine Sulfate, Vincristin, Sutivin, Vincrisan, Eldisine), vincristine sulfate (Oncovin), gefitinib, escitalopram oxalate, Gene Therapy to Activate p53 for Oncology, cevimeline hydrochloride, docetaxel; lenograstim, bortezomib; docetaxel; irinotecan, carboplatin; paclitaxel, cisplatin; docetaxel; fluorouracil, human papillomavirus vaccine (Vaccination Against Human Papillomavirus Types 16 and 18 and Unvaccinated Controls), carboplatin; cisplatin; paclitaxel, undisclosed epidermal growth factor receptor inhibitor, cetuximab, sorafenib tosylate; sunitinib malate, amifostine, cisplatin; dexamethasone; docetaxel; metoclopramide, platinum based chemotherapy, cetuximab; nimotuzumab, nimotuzumab, dobutamine hydrochloride; dopexamine hydrochloride; epinephrine; norepinephrine bitartrate, cetuximab; cisplatin, cetuximab; cisplatin; docetaxel; fluorouracil, cisplatin; paclitaxel, Gendicine, Doce onkovis (Docetaxel), Picibanil, docetaxel; lobaplatin, oxytetracycline hydrochloride, cisplatin; mitomycin, bleomycin, nimotuzumab, cisplatin; fluorouracil; nimotuzumab, cetuximab; cisplatin; cyclophosphamide; dacarbazine; docetaxel; doxorubicin; etoposide; fluorouracil; gemcitabine hydrochloride; irinotecan hydrochloride; oxaliplatin; paclitaxel; pemetrexed disodium; temozolomide, varenicline, acetylcysteine, dopamine; norepinephrine, (gimeracil+oteracil+tegafur), nimotuzumab, icotinib hydrochloride, Kushen (kuh-seng), Carboxymethylpachymaran, BCM-95, Lactofos, Pegfilgrastim, methadone, Varanadi ghrita, cisplatin; palifermin, cetuximab, cisplatin; lapatinib ditosylate, gefitinib, zalutumumab, erlotinib hydrochloride, beta carotene; E-Tabs, bevacizumab, levothyroxine; liothyronine sodium; recombinant human thryroid stimulating hormone, cisplatin; docetaxel; fluorouracil; hydroxyurea, fluorouracil, docetaxel; St. John's Wort, carboplatin; cisplatin; fluorouracil; paclitaxel, Biafine, methotrexate, cisplatin; fluorouracil, alpha tocopherol; isotretinoin; recombinant interferon alfa, panitumumab, cisplatin, bleomycin; fluorouracil; leucovorin; methotrexate; vincristine, nimotuzumab, panitumumab, amifostine; fluorouracil, cisplatin; docetaxel; fluorouracil, capecitabine; cisplatin; fluorouracil, pemetrexed disodium, cisplatin; gemcitabine, tranexamic acid, carboplatin; fluorouracil, cefazolin, epoetin alfa, tirapazamine, erlotinib hydrochloride, cetuximab; docetaxel; fluorouracil, megestrol, contusugene ladenovec, cevimeline hydrochloride, cisplatin; fluorouracil, cisplatin; fluorouracil; paclitaxel, isotretinoin, porfiromycin, escitalopram oxalate, gimeracil+oteracil+tegafur, IntraDose (Cisplatin Plus Epinephrine), misonidazole, tirapazamine, carboplatin; cisplatin; docetaxel; fluorouracil, gefitinib, epoetin alfa, paclitaxel, gefitinib, palifermin, pilocarpine, celecoxib, cisplatin; docetaxel; filgrastim; fluorouracil; paclitaxel, cisplatin; fluorouracil; leucovorin, cisplatin; gemcitabine; mannitol, Lactobacillus brevis CD2, Glutamine, carbogen; niacinamidem, cetuximab; cisplatin; docetaxel; fluorouracil, carbogen; carbon dioxide; niacinamide, cisplatin; docetaxel; fluorouracil, Soluble Beta Glucan, contusugene ladenovec, zalutumumab, talimogene laherparepvec, sucralfate, doxepin, methotrexate, amifostine, capsaicin, cisplatin; fluorouracil; panitumumab, aldesleukin, tranexamic acid, zinc sulfate, bacillus calmette-guerin [connaught] vaccine; bleomycin; cyclophosphamide; fluorouracil; methotrexate, amifostine, fluorouracil; hydroxyurea, bacitracin; clotrimazole; gentamicin, cyclophosphamide; doxorubicin, pelareorep, filgrastim, enteral nutrition, pentoxifylline, epirubicin; fluorouracil; leucovorin; mitomycin, porfiromycin, bleomycin; cisplatin; methotrexate; vincristine, bacillus calmette-guerin vaccine; isoniazid; methotrexate, fluorouracil; leucovorin; methotrexate, rAd-p53, PV-10, Leukocyte Interleukin, nimotuzumab, afatinib dimaleate, afatinib dimaleate; cisplatin, carboplatin; cetuximab; fluorouracil, cetuximab; cisplatin, nedaplatin, docetaxel; fluorouracil, nimorazole, gemcitabine hydrochloride, afatinib dimaleate, nedaplatin, contusugene ladenovec, Lactobacillus brevis CD2, cetuximab, nimotuzumab, E-10A, cisplatin; gemcitabine, cisplatin; lobaplatin, endostatin (recombinant)_dapsone; doxycycline; minocycline, carboplatin; cyclophosphamide; docetaxel; doxorubicin; paclitaxel, nivolumab, pelareorep, autologous stem cells; carboplatin; etoposide; ifosfamide, vinflunine ditartrate, gemcitabine, cisplatin; fluorouracil; mitomycin, porfiromycin, Olimel, pembrolizumab, AminoPure, nedaplatin, Liang Ge San, eicosapentaenoic acid, celecoxib; methotrexate, cisplatin; pembrolizumab, (tegafur+uracil); cisplatin; epirubicin; mitomycin, durvalumab; tremelimumab, sodium hypochlorite, cetuximab; cisplatin, cisplatin; paclitaxel, amcasertib, capecitabine, R-TPR-033, VB-4847, gabapentin, raltitrexed, cisplatin; fluorouracil; leucovorin, cisplatin; docetaxel, celecoxib, durvalumab; durvalumab+tremelimumab, TT-10, (sodium alginate+sodium carbonate+propolis+aloe vera+calendula+honey+chamomile); cisplatin, pembrolizumab; talimogene laherparepvec, avelumab, nimorazole, eicosapentaenoic acid, lovastatin, dexamethasone; etoposide; gemcitabine; pegaspargase, ipilimumab; nivolumab, cetuximab; cisplatin; nivolumab, capecitabine; cisplatin; docetaxel, isotretinoin, carboplatin; cisplatin; gemcitabine; paclitaxel, erlotinib hydrochloride, VB-4847 (Proxinium Plus Best Supportive Care), celecoxib; thalidomide, cisplatin; fluorouracil, curcumin, celecoxib, imiquimod, cisplatin; cyclophosphamide; etoposide, sotatercept, cisplatin; docetaxel; fluorouracil, cetuximab; cisplatin; docetaxel, human endostatin, melatonin, epigallocatechin gallate, cisplatin; gemcitabine, gemcitabine; paclitaxel, (gimeracil+oteracil+tegafur), eicosapentaenoic acid; undisclosed nutritional supplement, celecoxib; methotrexate, pembrolizumab (Keytruda), afatinib dimaleate, cetuximab (Erbitux), durvalumab, durvalumab+tremelimumab, E-10A, entrectinib, Leukocyte Interleukin (Multikine), nimotuzumab, nivolumab (Opdivo), pelareorep (Reolysin), TT-10, vinflunine ditartrate (Javlor), acalabrutinib, AlloVax and alpelisib.

[0292] In some embodiments, the at least one additional pharmaceutically active ingredient is a compound, which is conventionally used in the treatment and/or prophylaxis of cutaneous T-cell lymphoma, preferably advanced cutaneous T-cell lymphoma, wherein the compound is preferably selected from the group consisting of Nivolumab, Cetuximab (Erbitux), paclitaxel albumin bound (Abraxane), gimeracil+oteracil+tegafur (TS-1), docetaxel (Docetaxel, Doxel, Taxotere, Docetaxel An, Nanoxel M, Tautax, Docetaxel-AS, Docetaxel-M, Qvidadotax, Relidoce, Taxelo, Oncodocel, Doxotel, Pacancer, Docetrust, Dodetax, Dodabur, Soulaxcin, Taxedol, Docefim, Ribodocel, Critidoc, Asodoc, Chemodoc, Docelibbs, Docenat, Dincilezan, Dostradixinol, Docefrez, Camitotic, Oncotaxel, Somatixel, Belotaxel, Qvidadotax, Taxceus, Cetadocure, Docetaxel CT, Tevaxter, Docirena, Eurotere, Axtere, Celotax, Taxanit, Drobanos, Cetado, Doxocad, Taxceus, Egidox, Tedocad, Docecad, Docelex, Docetax, Docetere, Dotax, Taxuba, Monotaxel, Taceedo, Detaxl, Docet, Ferdotax, Wintaxel, Kamdocon, Naltoxater), tegafur+uracil (Uft, Uft E, tefudex, Unitoral, Luporal Tagracil), fluorouracil (bn: 5-FU, Fluorouracil, Fluorouracile), gimeracil+oteracil+tegafur ODT (bn TS-1 Combination OD), bleomycin sulfate (Tecnomicina, Cinaleo, Bleomycin, Bloicin-S, Bonar, Bleocin, Bleo Bleomycin Sulfate, Bleocel, Bleotex, Oncobleo, Bleonco, Bleosol, Lyoble, Bleomycin Sulfate, Blenamax, Blenoxane, Bleomicina, Bleomycine Bellon Bleoprim), carboplatin (Carboplatin Platamine CS Carbaccord Carboplatina Carboplatino Paraplatin Carbosin Tecnocarb Carbomerck, Paract, Carboplatine CTRS, Carboplatine Intsel Chimos, Carbokem Carbotinol Fauldcarbo, Evocarb, Citoplatina, Platin, Carboplatine Qualimed, Carboplatine, Carboplatino, Carboplatin), ciprofloxacin (Hypoflox, Ufexil), ciprofloxacin hydrochloride (Ciprofloxacin Pharma, Prodin, Ciproxin), cisplatin (Cisplatin, Stritin, Ifapla, Accocit, Unistin, Cancertin, Cisplan, Citoplax, Nuoxin, Placis, Cisplatino, Displanor, Cisplatine, Randa, Cisplatin, Cispla, Fauldcispla, Briplatin, Platinex, Platinol, Riboplatin, Platistine CS, Platosin, Accocit), cyclophosphamide (Endoxan, Cyclophosphamide), doxifluridine (Doxifluridine, May Vladimir, Doxifluridine), doxorubicin (Doxorubicin Hydrochloride, Adriamycin RDF, Doxorubici, Doxorubicin Hydrochloride, Doxorubicin PFS), epirubicin hydrochloride (Brecila, Cloridrato De Epirrubicina, Epirubicin, Farmorubicina, Nuovodox, Adnexa, 4-Eppedo, Favicin), fluorouracil (Agicil, Fluorouracil, Fauldfluor, Oncourcil Flocil, 5 Flucel), folic acid+methotrexate (Truxofol), human adenovirus type 5 (recombinant) (Oncorine), hydroxyurea (Oxyrea, Durea, Myelostat, Riborea, Unidrea, Ondrea, Hydran, Leukocel, Hydroxyurea, Hydrea), ifosfamide (Holoxan, Ifosfamide EG), levamisole (Zirsol), methotrexate (Tratoben, Methotrexate, Fresexate, Neometho, Fauldmetro, Methotrexate Sodium, Methocel, Hytas, Methaccord, Methofill, Metotrexato, Traxacord, Plastomet, Tevatrex, Metrex, Caditrex, Carditrex, Vibzi, Imutrex, Biotrexate, Methorex, Mexate, Neotrexate, Oncotrex, Remtrex, Trixilem, Hi-Trex, Metorex, Trex, Unitrexate, Ebetrexac, Fauldexato, Lantarel, Maxtrex, Miantrex CS, Rheumatrex, Folex, Folex PFS, Abitrexate, Trexall, Emthexate, Abitrexate, Meadow, Mexate Aq, Biometrox, Otaxem), Mitomycin (Mitomycin C, Mitomycin, Mitonco, Lyomit), Nedaplatin (Jiebaishu, Aoxianda, Aqupla), Nimesulide (Nimulid), Nimotuzumab (Biomab EGFR, Laedemab), Nitrofurantoin (Furatsilin), Ofloxacin (Entof), Paclitaxel (Paclitaxel, Taxol), peplomycin sulfate (Pepleo), picibanil (Picibanil), pirarubicin (Pirarubicin Hydrochloride, Therarubicin, Pinorubin), sodium glycididazole (CMNa), tegafur (Utefos, Icarus, Futraful, Tegafur Gimeracil Oteracil Potassium), temoporfin (Foscan), topotecan hydrochloride (Topotecan), ubenimex (Ubenimex), vinblastine sulfate (Vinblastine, Vblastin, Vincristine, Vincristine Sulfate, Vincristin, Sutivin, Vincrisan, Eldisine), vincristine sulfate (Oncovin), gefitinib, escitalopram oxalate, Gene Therapy to Activate p53 for Oncology, cevimeline hydrochloride, docetaxel; lenograstim, bortezomib; docetaxel; irinotecan, carboplatin; paclitaxel, cisplatin; docetaxel; fluorouracil, human papillomavirus vaccine (Vaccination Against Human Papillomavirus Types 16 and 18 and Unvaccinated Controls), carboplatin; cisplatin; paclitaxel, undisclosed epidermal growth factor receptor inhibitor, cetuximab, sorafenib tosylate; sunitinib malate, amifostine, cisplatin; dexamethasone; docetaxel; metoclopramide, platinum based chemotherapy, cetuximab; nimotuzumab, nimotuzumab, dobutamine hydrochloride; dopexamine hydrochloride; epinephrine; norepinephrine bitartrate, cetuximab; cisplatin, cetuximab; cisplatin; docetaxel; fluorouracil, cisplatin; paclitaxel, Gendicine, Doce onkovis (Docetaxel), Picibanil, docetaxel; lobaplatin, oxytetracycline hydrochloride, cisplatin; mitomycin, bleomycin, nimotuzumab, cisplatin; fluorouracil; nimotuzumab, cetuximab; cisplatin; cyclophosphamide; dacarbazine; docetaxel; doxorubicin; etoposide; fluorouracil; gemcitabine hydrochloride; irinotecan hydrochloride; oxaliplatin; paclitaxel; pemetrexed disodium; temozolomide, varenicline, acetylcysteine, dopamine; norepinephrine, (gimeracil+oteracil+tegafur), nimotuzumab, icotinib hydrochloride, Kushen (kuh-seng), Carboxymethylpachymaran, BCM-95, Lactofos, Pegfilgrastim, methadone, Varanadi ghrita, cisplatin; palifermin, cetuximab, cisplatin; lapatinib ditosylate, gefitinib, zalutumumab, erlotinib hydrochloride, beta carotene; E-Tabs, bevacizumab, levothyroxine; liothyronine sodium; recombinant human thryroid stimulating hormone, cisplatin; docetaxel; fluorouracil; hydroxyurea, fluorouracil, docetaxel; St. John's Wort, carboplatin; cisplatin; fluorouracil; paclitaxel, Biafine, methotrexate, cisplatin; fluorouracil, alpha tocopherol; isotretinoin; recombinant interferon alfa, panitumumab, cisplatin, bleomycin; fluorouracil; leucovorin; methotrexate; vincristine, nimotuzumab, panitumumab, amifostine; fluorouracil, cisplatin; docetaxel; fluorouracil, capecitabine; cisplatin; fluorouracil, pemetrexed disodium, cisplatin; gemcitabine, tranexamic acid, carboplatin; fluorouracil, cefazolin, epoetin alfa, tirapazamine, erlotinib hydrochloride, cetuximab; docetaxel; fluorouracil, megestrol, contusugene ladenovec, cevimeline hydrochloride, cisplatin; fluorouracil, cisplatin; fluorouracil; paclitaxel, isotretinoin, porfiromycin, escitalopram oxalate, gimeracil+oteracil+tegafur, IntraDose (Cisplatin Plus Epinephrine), misonidazole, tirapazamine, carboplatin; cisplatin; docetaxel; fluorouracil, gefitinib, epoetin alfa, paclitaxel, gefitinib, palifermin, pilocarpine, celecoxib, cisplatin; docetaxel; filgrastim; fluorouracil; paclitaxel, cisplatin; fluorouracil; leucovorin, cisplatin; gemcitabine; mannitol, Lactobacillus brevis CD2, Glutamine, carbogen; niacinamidem, cetuximab; cisplatin; docetaxel; fluorouracil, carbogen; carbon dioxide; niacinamide, cisplatin; docetaxel; fluorouracil, Soluble Beta Glucan, contusugene ladenovec, zalutumumab, talimogene laherparepvec, sucralfate, doxepin, methotrexate, amifostine, capsaicin, cisplatin; fluorouracil; panitumumab, aldesleukin, tranexamic acid, zinc sulfate, bacillus calmette-guerin [connaught] vaccine; bleomycin; cyclophosphamide; fluorouracil; methotrexate, amifostine, fluorouracil; hydroxyurea, bacitracin; clotrimazole; gentamicin, cyclophosphamide; doxorubicin, pelareorep, filgrastim, enteral nutrition, pentoxifylline, epirubicin; fluorouracil; leucovorin; mitomycin, porfiromycin, bleomycin; cisplatin; methotrexate; vincristine, bacillus calmette-guerin vaccine; isoniazid; methotrexate, fluorouracil; leucovorin; methotrexate, rAd-p53, PV-10, Leukocyte Interleukin, nimotuzumab, afatinib dimaleate, afatinib dimaleate; cisplatin, carboplatin; cetuximab; fluorouracil, cetuximab; cisplatin, nedaplatin, docetaxel; fluorouracil, nimorazole, gemcitabine hydrochloride, afatinib dimaleate, nedaplatin, contusugene ladenovec, Lactobacillus brevis CD2, cetuximab, nimotuzumab, E-10A, cisplatin; gemcitabine, cisplatin; lobaplatin, endostatin (recombinant)_dapsone; doxycycline; minocycline, carboplatin; cyclophosphamide; docetaxel; doxorubicin; paclitaxel, nivolumab, pelareorep, autologous stem cells; carboplatin; etoposide; ifosfamide, vinflunine ditartrate, gemcitabine, cisplatin; fluorouracil; mitomycin, porfiromycin, Olimel, pembrolizumab, AminoPure, nedaplatin, Liang Ge San, eicosapentaenoic acid, celecoxib; methotrexate, cisplatin; pembrolizumab, (tegafur+uracil); cisplatin; epirubicin; mitomycin, durvalumab; tremelimumab, sodium hypochlorite, cetuximab; cisplatin, cisplatin; paclitaxel, amcasertib, capecitabine, R-TPR-033, VB-4847, gabapentin, raltitrexed, cisplatin; fluorouracil; leucovorin, cisplatin; docetaxel, celecoxib, durvalumab; durvalumab+tremelimumab, TT-10, (sodium alginate+sodium carbonate+propolis+aloe vera+calendula+honey+chamomile); cisplatin, pembrolizumab; talimogene laherparepvec, avelumab, nimorazole, eicosapentaenoic acid, lovastatin, dexamethasone; etoposide; gemcitabine; pegaspargase, ipilimumab; nivolumab, cetuximab; cisplatin; nivolumab, capecitabine; cisplatin; docetaxel, isotretinoin, carboplatin; cisplatin; gemcitabine; paclitaxel, erlotinib hydrochloride, VB-4847 (Proxinium Plus Best Supportive Care), celecoxib; thalidomide, cisplatin; fluorouracil, curcumin, celecoxib, imiquimod, cisplatin; cyclophosphamide; etoposide, sotatercept, cisplatin; docetaxel; fluorouracil, cetuximab; cisplatin; docetaxel, human endostatin, melatonin, epigallocatechin gallate, cisplatin; gemcitabine, gemcitabine; paclitaxel, (gimeracil+oteracil+tegafur), eicosapentaenoic acid; undisclosed nutritional supplement, celecoxib; methotrexate, pembrolizumab (Keytruda), afatinib dimaleate, cetuximab (Erbitux), durvalumab, durvalumab+tremelimumab, E-10A, entrectinib, Leukocyte Interleukin (Multikine), nimotuzumab, nivolumab (Opdivo), pelareorep (Reolysin), TT-10, vinflunine ditartrate (Javlor), acalabrutinib, AlloVax and alpelisib.

[0293] In some embodiments, the at least one additional pharmaceutically active ingredient is a compound, which is conventionally used in the treatment and/or prophylaxis of vulvar cancer, preferably vulvar squamous cell cancer (VSCC), more preferably advanced VSCC, even more preferably VSCC refractory to surgery or chemotherapy, most preferably advanced VSCC refractory to surgery or chemotherapy, wherein the compound is preferably selected from the group consisting of mitomycin-C2, cisplatin, carboplatin, vinorelbine, paclitaxel, a tyrosine kinase inhibitor (e.g. erlotinib), nivolumab, bleomycin sulfate (e.g. bleomycin, bleomycin sulfate, blenamax, tevableo, oncobleo, bleo, bloicin-S), 5-fluorouracil (5-FU), Gardasil 9 (human papillomavirus (9-valent) vaccine), omiganan pentahydrochloride, alisertib, ISA-101 (13 synthetic long peptides (25-35 amino acids long) derived from the E6 and E7 oncogenic proteins of the HPV 16 virus), PDS-0101, Vicoryx (P16_37-63 vaccine), TA-CIN (fusion protein vaccine comprising capsid protein L2, E6 and E7 from HPV16) and human papillomavirus 16 E6 peptide vaccine.

[0294] According to some embodiments, the at least one additional pharmaceutically active ingredient is a therapeutic peptide or protein (e.g. an antibody, a decoy receptor or a cytokine) or a fragment or variant thereof. Said therapeutic peptide or protein, or a fragment or variant thereof, may be provided as such or in the form of a nucleic acid (e.g. an RNA as described herein) encoding the therapeutic peptide or protein, or a fragment or variant thereof. It is further preferred that the therapeutic peptide or protein (e.g. an antibody, a decoy receptor or a cytokine) comprises a signal peptide, e.g. a secretory signal peptide. Such signal peptides are sequences, which typically exhibit a length of about 15 to 30 amino acids and are preferably located at the N-terminus of the encoded peptide, without being limited thereto. Signal peptides as defined herein preferably allow the localization of the therapeutic peptide or protein, or a fragment or variant thereof, to a certain cellular membrane or a certain cellular compartment, preferably the cell surface, the cytoplasmic membrane, the endoplasmic reticulum (ER) or the endosomal-lysosomal compartment.

[0295] In certain embodiments, the signal peptide may be selected from the list of amino acid sequences according to SEQ ID NOs: 1-1115 and SEQ ID NO: 1728 of the international patent application WO2017/081082, or fragments or variants of any of these sequences. On the nucleic acid level, any nucleic acid sequence (e.g. RNA sequence) may be selected, which encodes such amino acid sequences. In this context, the disclosure of WO2017/081082 is herewith incorporated by reference.

[0296] Examples of signal peptide sequences as defined herein include, without being limited thereto, signal sequences (or fragments or variants thereof) of classical or non-classical MHC-molecules (e.g. signal sequences of MHC I and II molecules, e.g. of the MHC class I molecule HLA-A*0201), cytokines or immunoglobulines as defined herein, the invariant chain of immunoglobulines or antibodies as defined herein, Lamp1, Tapasin, Erp57, Calretikulin, Calnexin, further membrane associated proteins, proteins associated with the endoplasmic reticulum (ER) or proteins associated with the endosomal-lysosomal compartment. Particularly preferred in the context of the present invention are the signal sequences of MHC class I molecule HLA-A*0201, or a fragment or variant thereof.

[0297] According to a preferred embodiment, the at least one additional pharmaceutically active ingredient is a therapeutic peptide or protein, or a fragment or variant thereof, comprising a signal sequence (or a fragment or variant thereof) derived from HLA-A2, HsPLAT, HsEPO, HsALB, IgE, HsCD5, HsIL2, HsCTRB2, human immunoglobulin heavy chain, human immunoglobulin light chain, GpLuc, Mice immunoglobulin kappa, NrChit1, CILp1.1, NgNep1, HsAzu1, HsCD33, VcCtxB, HsCST4, HsIns-iso1, HsSPARC, H₁N1 (Netherlands 2009), FV, MHCII or JEV.

[0298] It is further preferred that the at least one additional pharmaceutically active ingredient is a therapeutic peptide or protein (e.g. an antibody, a decoy receptor or a cytokine), or a fragment or variant thereof, comprising or consisting of an amino acid sequence according to any one of SEQ ID NO: 739-769, or a fragment or variant of any one of these amino acid sequences. Preferably, the at least one additional pharmaceutically active ingredient is a therapeutic peptide or protein (e.g. an antibody, a decoy receptor or a cytokine), or a fragment or variant thereof, comprising or consisting of an amino acid sequence identical or at least 50%, 60%, 70%, 75%, 80%, 81%, 82%, 83%, 84%, 85%, 86%, 87%, 88%, 89%, 90%, 91%, 92%, 93%, 94%, 95%, 96%, 97%, 98%, 99% identical to any one of SEQ ID NO: 739-769.

[0299] According to a particularly preferred embodiment, the at least one additional pharmaceutically active ingredient is a checkpoint modulator or a cytokine.

[0300] Negative regulatory T cell surface molecules were discovered, which are upregulated in activated T cells in order to dampen their activity, thus reducing the effectiveness of said activated T cells in the killing of tumor cells. These inhibitory molecules were termed negative co-stimulatory molecules due to their homology to the T cell co-stimulatory molecule CD28. These proteins, also referred to as immune checkpoint proteins, function in multiple pathways including the attenuation of early activation signals, competition for positive co-stimulation and direct inhibition of antigen presenting cells (Bour-Jordan et al., 2011. Immunol Rev. 241(1):180-205).

[0301] In the context of the present invention, a checkpoint modulator is typically a molecule, such as a protein (e.g. an antibody), a dominant negative receptor, a decoy receptor, or a ligand or a fragment or variant thereof, which modulates the function of an immune checkpoint protein, e.g. it inhibits or reduces the activity of checkpoint inhibitors (or inhibitory checkpoint molecules) or it stimulates or enhances the activity of checkpoint stimulators (or stimulatory checkpoint molecules). Therefore, checkpoint modulators as defined herein, influence the activity of checkpoint molecules.

[0302] In this context, inhibitory checkpoint molecules are defined as checkpoint inhibitors and can be used synonymously.

[0303] In addition, stimulatory checkpoint molecules are defined as checkpoint stimulators and can be used synonymously.

[0304] Preferably, the checkpoint modulator is selected from agonistic antibodies, antagonistic antibodies, ligands, dominant negative receptors, and decoy receptors or combinations thereof.

[0305] Methods for generating and using mRNA-encoded antibodies are known in the art (e.g. WO2008/083949 or PCT/EP2017/060226).

[0306] Preferred inhibitory checkpoint molecules that may be inhibited by a checkpoint modulator in the context of the invention are PD-1, PD-L1, CTLA-4, PD-L2, LAG3, TIM3/HAVCR2, 2B4, A2aR, B7H3, B7H4, BTLA, CD30, CD160, CD155, GAL9, HVEM, IDO1, IDO2, KIR, LAIR1 and VISTA.

[0307] Preferred stimulatory checkpoint molecules that may be stimulated by a checkpoint modulator in the context of the invention are CD2, CD27, CD28, CD40, CD137, CD226, CD276, GITR, ICOS, OX40 and CD70.

[0308] According to a preferred embodiment, the isRNA is for use as described herein, wherein the use comprises—as an additional pharmaceutically active ingredient—a checkpoint modulator selected from the group consisting of the checkpoint modulator is selected from the group consisting of a PD-1 inhibitor, a PD-L1 inhibitor, a PD-L2 inhibitor, a CTLA-4 inhibitor, a LAG3 inhibitor, a TIM3 inhibitor, a TIGIT-inhibitor, an OX40 stimulator, a 4-1BB stimulator, a CD40L stimulator, a CD28 stimulator and a GITR stimulator.

[0309] According to a preferred embodiment, the checkpoint modulator as used herein targets a member of the PD-1 pathway. Members of the PD-1 pathway are typically proteins, which are associated with PD-1 signaling. On the one hand, this group comprises proteins, which induce PD-1 signaling upstream of PD-1 as e.g. the ligands of PD-1, PD-L1 and PD-L2, and the signal transduction receptor PD-1. On the other hand, this group comprises signal transduction proteins downstream of PD-1 receptor. Particularly preferred as members of the PD-1 pathway in the context of the present invention are PD-1, PD-L1 and PD-L2.

[0310] In the context of the present invention, a PD-1 pathway antagonist (or PD-1 inhibitor) is preferably defined herein as a compound capable to impair the PD-1 pathway signaling, preferably signaling mediated by the PD-1 receptor. Therefore, the PD-1 pathway antagonist may be any antagonist directed against any member of the PD-1 pathway capable of antagonizing PD-1 pathway signaling.

[0311] In a preferred embodiment, the checkpoint modulator used herein is a PD-1 inhibitor or a PD-L1 inhibitor, wherein the PD-1 inhibitor is preferably an antagonistic antibody directed against PD-1 and the PD-L1 inhibitor is preferably an antagonistic antibody directed against PD-L1.

[0312] In this context, the antagonist may be an antagonistic antibody as defined herein, targeting any member of the PD-1 pathway, preferably an antagonistic antibody directed against PD-1 receptor, PD-L1 or PD-L2. Such an antagonistic antibody may also be encoded by a nucleic acid. Also, the PD-1 pathway antagonist may be a fragment of the PD-1 receptor blocking the activity of PD1 ligands. B7-1 or fragments thereof may act as PD1-antagonizing ligands as well. Additionally, a PD-1 pathway antagonist may be a protein comprising (or a nucleic acid coding for) an amino acid sequence capable of binding to PD-1 but preventing PD-1 signaling, e.g. by inhibiting PD-1 and B7-H1 or B7-DL interaction (WO 2014/127917; WO2012062218).

[0313] Particularly preferred are the anti-PD1 antibodies Nivolumab (MDX-1106/BMS-936558/ONO-4538), (Brahmer et al., 2010. J Clin Oncol. 28(19):3167-75; PMID: 20516446); Pidilizumab (CT-011), (Berger et al., 2008. Clin Cancer Res. 14(10):3044-51; PMID: 18483370); Pembrolizumab (MK-3475, SCH 900475); AMP-224, and MEDI0680 (AMP-514).

[0314] Particularly preferred are also the anti-PD-L1 antibodies MDX-1105/BMS-936559 (Brahmer et al. 2012. N Engl J Med. 366(26):2455-65; PMID: 22658128); atezolizumab (MPDL3280A/RG7446); durvalumab (MEDI4736); and avelumab (MSB0010718).

[0315] In a further preferred embodiment the checkpoint modulator is a decoy receptor (e.g. a soluble receptor). Preferably, the decoy receptor is a soluble PD1 receptor. More preferably, the decoy receptor is a soluble variant of a PD-1 receptor or a fragment or variant thereof, wherein the PD-1 receptor is derived from a mammal, preferably selected from the group comprising, without being limited thereto, e.g. goat, cattle, swine, dog, cat, donkey, horse, monkey, ape, a rodent (such as a mouse, hamster, rabbit or rat), and, most preferably, human. Even more preferably, the decoy receptor is a soluble variant of a PD-1 receptor or a fragment or variant thereof, wherein the PD-1 receptor comprises an amino acid sequence identical or at least 50%, 60%, 70%, 75%, 80%, 81%, 82%, 83%, 84%, 85%, 86%, 87%, 88%, 89%, 90%, 91%, 92%, 93%, 94%, 95%, 96%, 97%, 98%, 99% identical to the amino acid sequence according to SEQ ID NO: 1, or a fragment or variant thereof. In a particularly preferred embodiment, the decoy receptor used herein as a checkpoint modulator is a soluble PD-1 receptor comprising an amino acid sequence identical or at least 50%, 60%, 70%, 75%, 80%, 81%, 82%, 83%, 84%, 85%, 86%, 87%, 88%, 89%, 90%, 91%, 92%, 93%, 94%, 95%, 96%, 97%, 98%, 99% identical to the amino acid sequence according to SEQ ID NO: 2, or a fragment or variant thereof.

[0316] According to another embodiment, the checkpoint modulator used herein is an OX40 stimulator. OX40 is a member of the TNFR-superfamily of receptors, and is expressed on the surface of antigen-activated mammalian CD4+ and CD8+ T lymphocytes. OX40 ligand (OX40L, also known as gp34, ACT-4-L, and CD252) is a protein that specifically interacts with the OX40 receptor. The term OX40L includes the entire OX40 ligand, soluble OX40 ligand, and fusion proteins comprising a functionally active portion of OX40 ligand covalently linked to a second moiety, e.g., a protein domain. Also included within the definition of OX40L are variants which vary in amino acid sequence from naturally occurring OX40L, but which retain the ability to specifically bind to the OX40 receptor. Further included within the definition of OX40L are variants thereof, which enhance the biological activity of OX40. An OX40 agonist is a molecule which induces or enhances the biological activity of OX40, e.g. signal transduction mediated by OX40. An OX40 agonist is preferably defined herein as a binding molecule capable of specific binding to OX40. Therefore, the OX40 agonist may be any agonist binding to OX40 and capable of stimulating OX40 signaling. In this context, the OX40 agonist may be an agonistic antibody binding to OX40.

[0317] OX40 agonists and anti-OX40 monoclonal antibodies are described in WO1995/021251, WO1995/012673 and WO1995/21915. Particularly preferred is the anti-OX40 antibody 9B12, a murine anti-OX40 monoclonal antibody directed against the extracellular domain of human OX40 (Weinberg et al., 2006. J. Immunother. 29(6):575-585).

[0318] In another embodiment, the checkpoint modulator as used herein is an antagonistic antibody is selected from the group consisting of anti-CTLA4, anti-PD1, anti-PD-L1, anti-Vista, anti-Tim-3, anti-TIGIT, anti-LAG-3, and anti-BTLA.

[0319] Preferably, an anti-CTLA4 antibody that may be used as a checkpoint modulator is directed against Cytotoxic T lymphocyte antigen-4 (CTLA-4). CTLA-4 is mainly expressed within the intracellular compartment of T cells. After a potent or long-lasting stimulus to a naive T cell via the T cell receptor (TCR), CTLA-4 is transported to the cell surface and concentrated at the immunological synapse. CTLA-4 then competes with CD28 for CD80/CD86 and down-modulates TCR signaling via effects on Akt signaling. Thus CTLA-4 functions physiologically as a signal dampener (Weber, J. 2010. Semin. Oncol. 37(5):430-9).

[0320] In preferred embodiments, the isRNA is for use as described herein, wherein the use comprises—as an additional pharmaceutically active ingredient—a CTLA4 antagonist, which is preferably an antagonistic antibody directed against CTLA4 (anti-CTLA4 antibody). The term ‘CTLA4 antagonist’ as used herein comprises any compound, such as an antibody, that antagonizes the physiological function of CTLA4. In the context of the present invention, the term ‘anti-CTLA4 antibody’ may refer to an antagonistic antibody directed against CTLA4 (or a functional fragment or variant of said antibody) or to a nucleic acid, preferably an RNA, encoding said antagonistic antibody (or a functional fragment thereof). A functional fragment or variant of an anti-CTLA4 antibody preferably acts as a CTLA4 antagonist. More preferably, the term ‘anti-CTLA4 antibody’ refers to a monoclonal antibody directed against CTLA4 (or a functional fragment or variant of such an antibody) or to a nucleic acid encoding a monoclonal antibody directed against CTLA4 (or a functional fragment or variant of such an antibody). The term ‘anti-CTLA4 antibody’ as used herein may refer to the heavy or light antibody chain, respectively, or also refer to both antibody chains (heavy and light chain), or to a fragment or variant of any one of these chains. Preferably, the fragment or variant of an anti-CTLA4 antibody as used herein is a functional fragment or variant, preferably as described herein.

[0321] Particularly preferred are the anti-CTLA-4 antibodies ipilimumab (Yervoy®), tremelimumab, and AGEN-1884. Further preferred anti-CTLA4 antibodies as used herein comprise BMS 734016; BMS-734016; BMS734016; MDX 010; MDX 101; MDX-010; MDX-101; MDX-CTLA-4; MDX-CTLA4; MDX010; Winglore; and Yervoy, or a functional fragment or variant of any one of these antibodies.

[0322] According to some embodiments, the checkpoint modulator as used herein is a CTLA4 antagonist, preferably an anti-CTLA4 antibody. Therein, the anti-CTLA4 antibody preferably comprises two polypeptide chains, typically referred to as ‘heavy chain’ and ‘light chain’, respectively. In a preferred embodiment, the heavy chain comprises or consists of an amino acid sequence according to any one of SEQ ID NO: 645, 832, 661 or 833, or a fragment or variant of any one of these amino acid sequences, preferably according to SEQ ID NO: 645, or a fragment or variant thereof. The heavy chain preferably comprises or consists of an amino acid sequence identical or at least 50%, 60%, 70%, 75%, 80%, 81%, 82%, 83%, 84%, 85%, 86%, 87%, 88%, 89%, 90%, 91%, 92%, 93%, 94%, 95%, 96%, 97%, 98%, 99% identical to any one of SEQ ID NO: 645, 832, 661 or 833, preferably to SEQ ID NO: 645. The light chain preferably comprises or consists of an amino acid sequence according to any one of SEQ ID NO: 677, 834, 693 or 706, or a fragment or variant of any one of these amino acid sequences, preferably according to SEQ ID NO: 677, or a fragment or variant thereof. More preferably, the light chain comprises or consists of an amino acid sequence identical or at least 50%, 60%, 70%, 75%, 80%, 81%, 82%, 83%, 84%, 85%, 86%, 87%, 88%, 89%, 90%, 91%, 92%, 93%, 94%, 95%, 96%, 97%, 98%, 99% identical to any one of SEQ ID NO: 677, 834, 693 or 706, preferably to SEQ ID NO: 677. In preferred embodiments, the anti-CTLA4 antibody thus comprises a heavy chain and a light chain as described above, or a fragment or variant of each of these chains. Most preferably, the anti-CTLA4 antibody comprises a heavy chain and a light chain, or a fragment or variant thereof, wherein the heavy chain, or the fragment or variant thereof, comprises or consists of an amino acid sequence according to SEQ ID NO: 645, or a fragment or variant thereof, and wherein the light chain, or the fragment or variant thereof, comprises or consists of an amino acid sequence according to SEQ ID NO: 677, or a fragment or variant thereof.

[0323] According to a further embodiment, the checkpoint modulator as used herein is at least one antibody described in Table 1 or a fragment or variant thereof

TABLE 1
Antibodies directed against checkpoint molecules

| Name | Target |
|---|---|
| Urelumab | 4-1BB/CD137 |
| PF-05082566 | 4-1BB/CD137 |
| 8H9 | B7-H3 |
| Enoblituzumab | B7-H3 |
| Ipilimumab | CD152/CTLA-4 |
| Ticilimumab (=tremelimumab) | CD152/CTLA-4 |
| Tremelimumab | CD152/CTLA-4 |
| Varlilumab | CD27 |
| Teneliximab | CD40 |
| Vorsetuzumab mafodotin | CD70 |
| Lirilumab | KIR2D |
| GSK-3174998 | OX40 |
| MEDI-6469 | OX40 |
| MEDI-6383 | OX40 |
| MEDI-0562 | OX40 |
| PF-04518600 | OX40 |
| RG-7888 | OX40 |
| PF-06801591 | PD-1 |
| BGBA-317 | PD-1 |
| MEDI-0680 | PD-1 |
| MK-3475 | PD-1 |
| Nivolumab | PD-1 |
| PDR-001 | PD-1 |
| Pembrolizumab | PD-1 |
| Pidilizumab | PD-1 |
| REGN-2810 | PD-1 |
| SHR-1210 | PD-1 |
| TSR-042 | PD-1 |
| MDX-1106 | PD-1 |
| Merck 3745 | PD-1 |
| CT-011 | PD-1 |
| MEDI-0680 | PD-1 |
| PDR001 | PD-1 |
| REGN2810 | PD-1 |
| BGB-108 | PD-1 |
| BGB-A317 | PD-1 |
| AMP-224 | PD-1 |
| Atezolizumab | PD-L1 (CD274) |
| Avelumab | PD-L1 (CD274) |
| BMS-936559 | PD-L1 (CD274) |
| Durvalumab | PD-L1 (CD274) |
| MEDI-4736 | PD-L1 (CD274) |
| MPDL33280A | PD-L1 (CD274) |
| YW243.55.S70 | PD-L1 (CD274) |
| MDX-1105 | PD-L1 (CD274) |
| MSB0010718C | PD-L1 (CD274) |

[0324] According to a preferred embodiment, the at least one additional pharmaceutically active ingredient is a cytokine.

[0325] More preferably, the at least one additional pharmaceutically active ingredient is IL-12 or a fragment or variant thereof. Even more preferably, the at least one additional pharmaceutically active ingredient is an IL-12 analog or a fragment or variant thereof. Most preferably, the at least one additional pharmaceutically active ingredient is a compound, such as a peptide or a protein, a mutated peptide or a mutated protein, a coupled heterodimer, an antibody, preferably an antibody encoded by RNA, or artificial binding domains, which binds to IL-12 receptor and preferably leads to activation of the JAK-STAT signaling pathway. In a preferred embodiment, the at least one additional pharmaceutically active ingredient is an IL-12 receptor agonist.

[0326] Naturally occurring IL-12 is typically a heterodimeric cytokine encoded by two separate genes, IL-12A (p35) and IL-12B (p40). The naturally occurring heterodimer is also referred to as p70. In the context of the present invention, the term “IL-12” refers to a protein consisting of or comprising a naturally occurring form of heterodimeric IL-12, a monomeric IL-12A, a monomeric IL-12B as well as fragments or variants of any of these, such as fusions of IL-12A, or a fragment or variant thereof, with IL-12B, or a fragment or variant thereof, wherein said protein may also comprise an amino acid sequence that is not related to IL-12A or IL-12B. For example, the term “IL-12” as used herein also comprises a protein comprising IL-12A, or a fragment or variant thereof, IL-12B, or a fragment or variant thereof, wherein the IL-12A, or a fragment or variant thereof, is covalently linked to the IL-12B, or a fragment or variant thereof, by a linker, wherein the linker is preferably an amino acid sequence not related to IL-12A or IL-12B. More preferably, the linker is a peptide or protein linker, which preferably comprises an amino acid sequence according to SEQ ID NO: 9 or a fragment or variant thereof. Further, the term “IL-12” also comprises a protein, wherein IL-12A, or a fragment or variant thereof, is directly linked to the IL-12B, or a fragment or variant thereof, preferably via covalent linkage, more preferably via a peptide bond. In addition, the terms “IL-12” or “IL-12 analog” as used herein also comprise any compound, such as a peptide or a protein, a mutated peptide or a mutated protein, a coupled heterodimer, an antibody, preferably an antibody encoded by RNA, or artificial binding domains, which binds to an IL-12 receptor and which preferably leads to activation of the JAK-STAT signaling pathway. Hence, the terms “IL-12” or “IL-12 analog” as used herein also comprise a compound, such as a peptide or protein, that functions as an IL-12 receptor agonist.

[0327] As used herein, a fragment or variant of IL-12 as defined herein is preferably able to specifically bind to an IL-12 receptor and, more preferably, to function as an IL-12 receptor agonist.

[0328] According to a preferred embodiment, the IL-12 as used in the context of the present invention is derived from a mammal, preferably selected from the group comprising, without being limited thereto, e.g. goat, cattle, swine, dog, cat, donkey, horse, monkey, ape, a rodent (such as a mouse, hamster, rabbit or rat), and, most preferably, human.

[0329] Even more preferably, the IL-12 as used herein comprises an amino acid sequence identical or at least 50%, 60%, 70%, 75%, 80%, 81%, 82%, 83%, 84%, 85%, 86%, 87%, 88%, 89%, 90%, 91%, 92%, 93%, 94%, 95%, 96%, 97%, 98%, 99% identical to any one of the amino acid sequences according to SEQ ID NO: 3 to 8, or a fragment or variant of any of these sequences. Alternatively or in addition, the IL-12 as used herein comprises an amino acid sequence identical or at least 50%, 60%, 70%, 75%, 80%, 81%, 82%, 83%, 84%, 85%, 86%, 87%, 88%, 89%, 90%, 91%, 92%, 93%, 94%, 95%, 96%, 97%, 98%, 99% identical to the amino acid sequence according to SEQ ID NO: 9, or a fragment or variant thereof. In a particularly preferred embodiment, the IL-12 as used herein comprises an amino acid sequence identical or at least 50%, 60%, 70%, 75%, 80%, 81%, 82%, 83%, 84%, 85%, 86%, 87%, 88%, 89%, 90%, 91%, 92%, 93%, 94%, 95%, 96%, 97%, 98%, 99% identical to the amino acid sequence according to SEQ ID NO: 10, or a fragment or variant thereof.

[0330] In an alternative embodiment, the at least one additional pharmaceutically active ingredient is CD40L or a fragment or variant thereof. CD40L (also known as “CD40 ligand”, as “CD40LG” or as “CD154”) is primarily expressed on activated T and B cells. CD40L binds to CD40, which is typically expressed on antigen-presenting cells (APC). The interaction of CD40 and CD40L plays a pivotal role in the development of humoral and cellular immune responses. As used herein, the term “CD40L” refers to a naturally occurring CD40L protein or to a fragment or variant thereof, wherein the fragment or variant is preferably able to specifically bind to a CD40.

[0331] According to a preferred embodiment, the CD40L as used in the context of the present invention is derived from a mammal, preferably selected from the group comprising, without being limited thereto, e.g. goat, cattle, swine, dog, cat, donkey, horse, monkey, ape, a rodent (such as a mouse, hamster, rabbit or rat), and, most preferably, human. Even more preferably, the CD40L as used herein comprises an amino acid sequence identical or at least 50%, 60%, 70%, 75%, 80%, 81%, 82%, 83%, 84%, 85%, 86%, 87%, 88%, 89%, 90%, 91%, 92%, 93%, 94%, 95%, 96%, 97%, 98%, 99% identical to the amino acid sequence according to SEQ ID NO: 11, or a fragment or variant thereof.

[0332] According to a particularly preferred embodiment the at least one additional pharmaceutically active ingredient is a tumour antigen preferably selected from any tumor antigen comprising an amino acid sequence selected from the group consisting of SEQ ID NOs: 1-504; 4558-4560 of PCT/EP2017/059525, or a fragment or variant of any one of said amino acid sequences.

[0333] In a preferred embodiment, the present invention thus provides the isRNA for use in the treatment of a tumor or cancer disease as described herein, wherein the treatment comprises administration of at least one coding RNA (as additional pharmaceutically active ingredient) encoding at least one tumor antigen, preferably at least one mRNA, wherein the at least one coding sequence comprises a nucleic acid sequence selected from the group consisting of SEQ ID Nos. 505-4033; 4561-4591 of PCT/EP2017/059525, or a fragment or variant of any one of said sequences.

[0334] More preferably, the tumor antigen is selected from the group consisting of 1A01_HLA-A/m; 1A02; 5T4; ACRBP; AFP; AKAP4; alpha-actinin-_4/m; alpha-methylacyl-coenzyme_A_racemase; ANDR; ART-4; ARTC1/m; AURKB; B2MG; B3GN5; B4GN1; B7H4; BAGE-1; BASI; BCL-2; bcr/abl; beta-catenin/m; BING-4; BIRC7; BRCA1/m; BY55; calreticulin; CAMEL; CASP-8/m; CASPA; cathepsin_B; cathepsin_L; CD1A; CD1B; CD1C; CD1D; CD1E; CD20; CD22; CD276; CD33; CD3E; CD3Z; CD44_Isoform_1; CD44_Isoform_6; CD4; CD52; CD55; CD56; CD80; CD86; CD8A; CDC27/m; CDE30; CDK4/m; CDKN2A/m; CEA; CEAM6; CH3L2; CLCA2; CML28; CML66; COA-1/m; coactosin-like_protein; collagen_XXIII; COX-2; CP1B1; CSAG2; CT45A1; CT55; CT-_9/BRD6; CTAG2_Isoform_LAGE-1A; CTAG2_Isoform_LAGE-1B; CTCFL; Cten; cyclin_B1; cyclin_D1; cyp-B; DAM-10; DEP1A; E7; EF1A2; EFTUD2/m; EGFR; EGLN3; ELF2/m; EMMPRIN; EpCam; EphA2; EphA3; ErbB3; ERBB4; ERG; ETV6; EWS; EZH2; FABP7; FCGR3A_Version_1; FCGR3A_Version_2; FGF5; FGFR2; fibronectin; FOS; FOXP3; FUT1; G250; GAGE-1; GAGE-2; GAGE-3; GAGE-4; GAGE-5; GAGE-6; GAGE7b; GAGE-8_(GAGE-2D); GASR; GnT-V; GPC3; GPNMB/m; GRM3; HAGE; hepsin; Her2/neu; HLA-A2/m; homeobox_NKX3.1; HOM-TES-85; HPG1; HS71A; HS71B; HST-2; hTERT; iCE; IF2B3; IL10; IL-13Ra2; IL2-RA; IL2-RB; IL2-RG; IL-5; IMP3; ITA5; ITB1; ITB6; kallikrein-2; kallikrein-3; kallikrein-4; KI20A; KIAA0205; KIF2C; KK-LC-1; LDLR; LGMN; LIRB2; LY6K; MAGA5; MAGA8; MAGAB; MAGE-A10; MAGE-A12; MAGE-A1; MAGE-A2; MAGE-A3; MAGE-A4; MAGE-A6; MAGE-A9; MAGE-B10; MAGE-B16; MAGE-B17; MAGE-_B1; MAGE-B2; MAGE-B3; MAGE-B4; MAGE-B5; MAGE-B6; MAGE-C1; MAGE-C2; MAGE-C3; MAGE-D1; MAGE-D2; MAGE-D4; MAGE-_E1; MAGE-E1_(MAGE1); MAGE-E2; MAGE-F1; MAGE-H1; MAGEL2; mammaglobin_A; MART-1/melan-A; MART-2; MC1_R; M-CSF; mesothelin; MITF; MMP1_1; MMP7; MUC-1; MUM-1/m; MUM-2/m; MYCN; MYO1A; MYO1B; MYO1C; MYO1D; MYO1E; MYO1F; MYO1G; MYO1H; NA17; NA88-A; Neo-PAP; NFYC/m; NGEP; NPM; NRCAM; NSE; NUF2; NY-ESO-1; OA1; OGT; OS-9; osteocalcin; osteopontin; p53; PAGE-4; PAI-1; PAI-2; PAP; PATE; PAX3; PAX5; PD1L1; PDCD1; PDEF; PECA1; PGCB; PGFRB; Pim-1_-Kinase; Pin-1; PLAC1; PMEL; PML; POTEF; POTE; PRAME; PRDX5/m; PRM2; prostein; proteinase-3; PSA; PSB9; PSCA; PSGR; PSM; PTPRC; RAB8A; RAGE-1; RARA; RASH; RASK; RASN; RGS5; RHAMM/CD168; RHOC; RSSA; RU1; RU2; RUNX1; S-100; SAGE; SART-_1; SART-2; SART-3; SEPR; SERPINB5; SIA7F; SIA8A; SIAT9; SIRT2/m; SOX10; SP17; SPNXA; SPXN3; SSX-1; SSX-2; SSX3; SSX-4; ST1A1; STAG2; STAMP-1; STEAP-1; Survivin-2B; survivin; SYCP1; SYT-SSX-1; SYT-SSX-2; TARP; TCRg; TF2AA; TGFB1; TGFR2; TGM-4; TIE2; TKTL1; TPI/m; TRGV11; TRGV9; TRPC1; TRP-p8; TSG10; TSPY1; TVC_(TRGV3); TX101; tyrosinase; TYRP1; TYRP2; UPA; VEGFR1; WT1; and XAGE1.

[0335] In preferred embodiments, a tumor antigen, preferably as defined herein, is provided in the form of at least one coding RNA, preferably as defined herein, which comprises at least one coding sequence encoding a peptide or protein comprising a tumor antigen, or a fragment or variant thereof. Said at least one coding RNA comprising at least one coding sequence encoding a peptide or protein comprising a tumor antigen, or a fragment or variant thereof, may preferably be administered intratumorally. Alternatively, said at least one coding RNA may be administered intradermally, intramuscularly or subcutaneously.

[0336] In a preferred embodiment, the at least one additional pharmaceutically active ingredient used herein is a coding RNA, preferably an mRNA. Hence, according to certain embodiments, the invention provides an isRNA for use in the treatment of a tumor or cancer disease as described herein, wherein the treatment further comprises administration of at least one coding RNA, preferably at least one mRNA, wherein the isRNA is preferably administered intratumorally (e.g. locoregionally). In a particularly preferred embodiment, the coding RNA, preferably an mRNA, is administered intratumorally (e.g. locoregionally). More preferably, the isRNA as well as the at least one coding RNA are administered intratumorally (e.g. locoregionally).

[0337] In a preferred embodiment, the at least one additional pharmaceutically active ingredient used herein is a coding RNA, preferably an mRNA. Hence, according to certain embodiments, the invention provides an isRNA for use in the treatment of a tumor or cancer disease as described herein, wherein the treatment further comprises administration of at least one coding RNA, preferably at least one mRNA, wherein the isRNA is preferably administered intratumorally.

[0338] In a particularly preferred embodiment, the coding RNA, preferably an mRNA, is administered intratumorally. More preferably, the isRNA as well as the at least one coding RNA are administered intratumorally.

[0339] In some embodiments, the at least one coding RNA is formulated together with the isRNA for use as described herein. In a particularly preferred embodiment, the at least one coding RNA is formulated separately from the isRNA, wherein the at least one coding RNA as well as the isRNA are preferably administered intratumorally (e.g. locoregionally).

[0340] According to a preferred embodiment, the isRNA is formulated together with the at least one coding RNA, wherein the co-formulation is preferably administered intratumorally (e.g. locoregionally).

[0341] In some embodiments, the at least one coding RNA is formulated together with the isRNA for use as described herein. In a particularly preferred embodiment, the at least one coding RNA is formulated separately from the isRNA, wherein the at least one coding RNA as well as the isRNA are preferably administered intratumorally.

[0342] According to a preferred embodiment, the isRNA is formulated together with the at least one coding RNA, wherein the co-formulation is preferably administered intratumorally.

[0343] According to a preferred embodiment, the at least one coding RNA encodes at least one peptide or protein comprising at least one of the peptides or proteins described herein as an additional pharmaceutically active ingredient. More preferably, the at least one coding RNA encodes at least one peptide or protein comprising at least one peptide or protein selected from the group consisting of
[0344] IL-12,
[0345] CD40L and
[0346] a decoy PD-1 receptor, preferably a soluble PD-1 receptor, or a fragment or variant of any of these,
   wherein the IL-12, the CD40L or the decoy PD-1 receptor, or a fragment or variant of any of these, is preferably as described herein. Even more preferably, the at least one coding RNA encodes at least one peptide or protein comprising at least one peptide or protein selected from the group consisting of
[0347] IL-12,
[0348] CD40L,
[0349] a decoy PD-1 receptor, preferably a soluble PD-1 receptor, and
[0350] an anti-CTLA4 antibody,
   or a fragment or variant of any of these,
   wherein the IL-12, the CD40L, the decoy PD-1 receptor, or the anti-CTLA4 antibody, or a fragment or variant of any of these, is preferably as described herein.

[0351] Alternatively, the at least one coding RNA encodes at least one peptide or protein comprising at least one peptide or protein selected from the group consisting of
[0352] IL-12,
[0353] CD40L, and
[0354] an anti-CTLA4 antibody,
   or a fragment or variant of any of these,
   wherein the IL-12, the CD40L, or the anti-CTLA4 antibody, or a fragment or variant of any of these, is preferably as described herein.

[0355] According to a preferred embodiment, the invention provides an isRNA for use in the treatment of a tumor or cancer disease,

wherein the isRNA comprises a nucleic acid sequence according to formula (I) (GₗXₘGₙ), formula (II) (CₗXₘCₙ), formula (III) (NᵤGₗXₘGₙNᵥ)ₐ or formula (IV) (NᵤCₗXₘCₙNᵥ)ₐ, preferably at least one nucleic acid sequence according to any one of SEQ ID NOs: 433 to 434, 1014 to 1016, or a fragment or variant of any of these sequences,
wherein the isRNA is complexed with a cationic or polycationic compound, preferably with a polymeric carrier, more preferably with a polymeric carrier that is formed by a disulfide-crosslinked cationic component, which preferably comprises a peptide according to formula (V), (Va) and/or (Vb) and/or a compound according to formula (VI), more preferably at least one of the disulfide-crosslinked cationic peptides Cys-Arg₁₂, Cys-Arg₁₂-Cys, or Trp-Arg₁₂-Cys,
wherein the isRNA is preferably administered intratumorally,
wherein the treatment of a tumor or cancer disease comprises administration of at least one coding RNA, preferably at least one mRNA, encoding at least one peptide or protein comprising at least one peptide or protein selected from the group consisting of
[0356] IL-12,
[0357] CD40L and
[0358] a decoy PD-1 receptor, preferably a soluble PD-1 receptor,
   or a fragment or variant of any of these,
   wherein the IL-12, the CD40L or the decoy PD-1 receptor, or a fragment or variant of any of these, is preferably as described herein.

[0359] According to a particularly preferred embodiment, the invention provides an isRNA for use in the treatment of a tumor or cancer disease,

wherein the isRNA comprises a nucleic acid sequence according to formula (I) (GₗXₘGₙ), formula (II) (CₗXₘCₙ), formula (III) (NᵤGₗXₘGₙNᵥ)ₐ or formula (IV) (NᵤCₗXₘCₙNᵥ)ₐ, preferably at least one nucleic acid sequence according to any one of SEQ ID NOs: 433 to 437, 1014 to 1016, 1055 or 1056, or a fragment or variant of any of these sequences,
wherein the isRNA is complexed with a cationic or polycationic compound, preferably with a polymeric carrier, more preferably with a polymeric carrier that is formed by a disulfide-crosslinked cationic component, which preferably comprises a peptide according to formula (V), (Va) and/or (Vb) and/or a compound according to formula (VI), more preferably at least one of the disulfide-crosslinked cationic peptides Cys-Arg₁₂, Cys-Arg₁₂-Cys, or Trp-Arg₁₂-Cys, wherein the isRNA is preferably administered intratumorally,
wherein the tumor or cancer disease is preferably selected from the group consisting of melanoma, preferably advanced and/or metastatic melanoma, most preferably advanced cutaneous melanoma (cMEL), squamous cell cancer of the skin (SCC), preferably unresectable and/or advanced SCC, most preferably cutaneous squamous cell carcinoma (cSCC), or other forms of malignant skin cancer, adenocystic carcinoma (ACC), preferably advanced ACC, cutaneous T-cell lymphoma, preferably advanced cutaneous T-cell lymphoma, and squamous cell carcinoma of the head and neck (HNSCC), preferably advanced HNSCC;
wherein the treatment of a tumor or cancer disease comprises administration of at least one coding RNA, preferably at least one mRNA, encoding at least one peptide or protein comprising at least one peptide or protein selected from the group consisting of
[0360] IL-12,
[0361] CD40L and
[0362] a decoy PD-1 receptor, preferably a soluble PD-1 receptor,
   or a fragment or variant of any of these, and
   wherein the IL-12, the CD40L or the decoy PD-1 receptor, or a fragment or variant of any of these, is preferably as described herein.

[0363] According to a further preferred embodiment, the invention provides an isRNA for use in the treatment of a tumor or cancer disease,

wherein the isRNA comprises a nucleic acid sequence according to formula (I) (GₗXₘGₙ), formula (II) (CₗXₘCₙ), formula (III) (NᵤGₗXₘGₙNᵥ)ₐ or formula (IV) (NᵤCₗXₘCₙNᵥ)ₐ, preferably at least one nucleic acid sequence according to any one of SEQ ID NOs: 433 to 437, 1014 to 1016 or 1055 or 1056, more preferably according to any one of SEQ ID NO: 433, 434 or 1014 to 1016, or a fragment or variant of any of these sequences,
wherein the isRNA is complexed with a cationic or polycationic compound, preferably with a polymeric carrier, more preferably with a polymeric carrier that is formed by a disulfide-crosslinked cationic component, which preferably comprises a peptide according to formula (V), (Va) and/or (Vb) and/or a compound according to formula (VI), more preferably at least one of the disulfide-crosslinked cationic peptides Cys-Arg₁₂, Cys-Arg₁₂-Cys, or Trp-Arg₁₂-Cys,
wherein the isRNA is preferably administered intratumorally, including peritumorally or locoregionally,
wherein the treatment of a tumor or cancer disease comprises administration of at least one coding RNA, preferably at least one mRNA, encoding at least one peptide or protein comprising at least one peptide or protein selected from the group consisting of
[0364] IL-12,
[0365] CD40L,
[0366] an anti-CTLA4 antibody, and
[0367] optionally, a decoy PD-1 receptor, preferably a soluble PD-1 receptor,
   or a fragment or variant of any of these,
   wherein the IL-12, the CD40L, the decoy PD-1 receptor, or the anti-CTLA4 antibody, or a fragment or variant of any of these, is preferably as described herein.

[0368] According to a particularly preferred embodiment, the invention provides an isRNA for use in the treatment of a tumor or cancer disease,

wherein the isRNA comprises a nucleic acid sequence according to formula (I) (GₗXₘGₙ), formula (II) (CₗXₘCₙ), formula (III) (NᵤGₗXₘGₙNᵥ)ₐ or formula (IV) (NᵤCₗXₘCₙNᵥ)ₐ, preferably at least one nucleic acid sequence according to any one of SEQ ID NOs: 433 to 437, 1014 to 1016, preferably according to any one of SEQ ID NOs: 433, 434 or 1014 to 1016,
or a fragment or variant of any of these sequences,
wherein the isRNA is complexed with a cationic or polycationic compound, preferably with a polymeric carrier, more preferably with a polymeric carrier that is formed by a disulfide-crosslinked cationic component, which preferably comprises a peptide according to formula (V), (Va) and/or (Vb) and/or a compound according to formula (VI), more preferably at least one of the disulfide-crosslinked cationic peptides Cys-Arg₁₂, Cys-Arg₁₂-Cys, or Trp-Arg₁₂-Cys,
wherein the isRNA is preferably administered intratumorally, including peritumorally or locoregionally,
wherein the tumor or cancer disease is preferably selected from the group consisting of
[0369] melanoma, preferably advanced and/or metastatic melanoma, more preferably advanced cutaneous melanoma (cMEL);
[0370] squamous cell cancer (SCC) of the skin, preferably unresectable and/or advanced SCC of the skin, more preferably cutaneous squamous cell carcinoma (cSCC), even more preferably unresectable and/or advanced cSCC;
[0371] squamous cell carcinoma of the head and neck (HNSCC), preferably advanced HNSCC, more preferably immunotherapy-refractory or platinum-refractory HNSCC, even more preferably immunotherapy-refractory advanced HNSCC or platinum-refractory advanced HNSCC;
[0372] adenocystic carcinoma (ACC), preferably advanced ACC;
[0373] cutaneous T-cell lymphoma, preferably advanced cutaneous T-cell lymphoma or cutaneous T-cell lymphoma of mycosis fungoides subtype, more preferably cutaneous T-cell lymphoma refractory to local treatment or to chemotherapy, even more preferably advanced cutaneous T-cell lymphoma refractory to local treatment or to chemotherapy, or cutaneous T-cell lymphoma of mycosis fungoides subtype refractory to local treatment or to chemotherapy, and
[0374] vulvar cancer, preferably vulvar squamous cell cancer (VSCC), more preferably advanced VSCC, even more preferably VSCC refractory to surgery or chemotherapy, most preferably advanced VSCC refractory to surgery or chemotherapy; or
   selected from the group consisting of cutaneous melanoma (cMEL), cutaneous squamous cell carcinoma (cSCC), head and neck squamous cell carcinoma (HNSCC), adenoid cystic carcinoma (ACC), cutaneous T-cell lymphoma, preferably cutaneous T-cell lymphoma of mycosis fungoides subtype, and vulvar squamous cell cancer (VSCC);
   wherein the tumor or the cancer disease is preferably at an advanced stage and/or refractory to standard therapy; wherein the treatment of a tumor or cancer disease comprises administration of at least one coding RNA, preferably at least one mRNA, encoding at least one peptide or protein comprising at least one peptide or protein selected from the group consisting of
[0375] IL-12,
[0376] CD40L,
[0377] an anti-CTLA4 antibody, and
[0378] optionally, a decoy PD-1 receptor, preferably a soluble PD-1 receptor,
   or a fragment or variant of any of these,
   wherein the IL-12, the CD40L, the decoy PD-1 receptor, or the anti-CTLA4 antibody, or a fragment or variant of any of these, is preferably as described herein.

[0379] According to preferred embodiments of the invention, the treatment or prophylaxis of a cancer or tumor disease as described herein comprises administration of a decoy PD-1 receptor as described herein in cases, where the subject does not receive or has not received a treatment with a PD-1 antagonist and/or a PD-L1 antagonist. In cases, where the patient does not receive or has not received anti PD-1 and/or anti PD-L1 treatment (e.g. an anti PD-1 antibody or an anti PD-L1 antibody) it is particularly preferred that the at least one mRNA encodes a decoy PD-1 receptor.

[0380] In other cases, where the subject receives or has received a treatment with a PD-1 or PD-L1 antagonist, the treatment or prophylaxis of a cancer or tumor disease as envisaged herein does preferably not comprise the administration of a decoy PD-1 receptor as described herein or a nucleic acid encoding a decoy PD-1 receptor or a fragment or variant thereof.

[0381] According to a preferred embodiment, the treatment of a tumor or cancer disease in a subject that receives or has received a treatment with a PD-1 or a PD-L1 antagonist comprises administration of at least one coding RNA, preferably at least one mRNA, encoding at least one peptide or protein comprising at least one peptide or protein selected from the group consisting of
[0382] IL-12,
[0383] CD40L, and
[0384] an anti-CTLA4 antibody,
   or a fragment or variant of any of these,
   wherein the IL-12, the CD40L, or the anti-CTLA4 antibody, or a fragment or variant of any of these, is preferably as described herein.

[0385] In further preferred embodiments, the treatment of a tumor or cancer disease in a subject that does not receive or has not received a treatment with a PD-1 or a PD-L1 antagonist comprises administration of at least one coding RNA, preferably at least one mRNA, encoding at least one peptide or protein comprising at least one peptide or protein selected from the group consisting of
[0386] IL-12,
[0387] CD40L, and
[0388] an anti-CTLA4 antibody, and
[0389] a decoy PD-1 receptor, preferably a soluble PD-1 receptor,
   or a fragment or variant of any of these,
   wherein the IL-12, the CD40L, the anti-CTLA4 antibody, or the decoy PD-1 receptor, or a fragment or variant of any of these, is preferably as described herein.

[0390] According to a preferred embodiment, the at least one coding RNA encodes a peptide or protein comprising IL-12 or a fragment or variant thereof as defined herein. In some embodiments, the at least one coding RNA encodes a peptide or protein, a mutated peptide or a mutated protein, a coupled heterodimer, an antibody, preferably an antibody encoded by RNA, or artificial binding domains comprising an IL-12 analog or a fragment or variant thereof as defined herein. Preferably, the encoded peptide or protein comprises an amino acid according to any one of SEQ ID NO: SEQ ID NO: 3 to 8, or a fragment or variant of any of these sequences. The encoded peptide or protein may preferably also comprise an amino acid sequence according to SEQ ID NO: 9, or a fragment or variant thereof. More preferably, the encoded peptide or protein comprises an amino acid according to SEQ ID NO: 10, or a fragment or variant thereof. Most preferably, the encoded peptide or protein comprises an amino acid sequence identical or at least 50%, 60%, 70%, 75%, 80%, 81%, 82%, 83%, 84%, 85%, 86%, 87%, 88%, 89%, 90%, 91%, 92%, 93%, 94%, 95%, 96%, 97%, 98%, 99% identical to any one of the amino acid sequences according to SEQ ID NO: 3 to 8, or a fragment or variant of any of these sequences. In a particularly preferred embodiment, the encoded peptide or protein comprises an amino acid sequence identical or at least 50%, 60%, 70%, 75%, 80%, 81%, 82%, 83%, 84%, 85%, 86%, 87%, 88%, 89%, 90%, 91%, 92%, 93%, 94%, 95%, 96%, 97%, 98%, 99% identical to the amino acid sequence according to SEQ ID NO: 10, or a fragment or variant thereof.

[0391] In a further preferred embodiment, the at least one coding RNA encodes a peptide or protein comprising IL-12 or a fragment or variant thereof as defined herein, wherein the at least one coding RNA comprises a nucleic acid sequence according to any one of SEQ ID NO: 14 to 19 or 21 or SEQ ID NOs: 440 to 445 or 447, preferably any one of SEQ ID NOs: 440 to 445 or 447, or a fragment or variant of any of these sequences. More preferably, the at least one coding RNA encodes a peptide or protein comprising IL-12 or a fragment or variant thereof as defined herein, wherein the at least one coding RNA comprises a nucleic acid sequence identical or at least 50%, 60%, 70%, 75%, 80%, 81%, 82%, 83%, 84%, 85%, 86%, 87%, 88%, 89%, 90%, 91%, 92%, 93%, 94%, 95%, 96%, 97%, 98%, 99% identical to any one of the nucleic acid sequences according to SEQ ID NO: 14 to 19 or 21 or SEQ ID NOs: 440 to 445 or 447, preferably any one of SEQ ID NOs: 440 to 445 or 447, or a fragment or variant of any of these sequences.

[0392] Alternatively or in addition, the at least one coding RNA encodes a peptide or protein comprising IL-12 or a fragment or variant thereof as defined herein, wherein the at least one coding RNA comprises a nucleic acid sequence according to SEQ ID NO: 20 or 446, preferably according to SEQ ID NO: 446, or a fragment or variant of any of these sequences. More preferably, the at least one coding RNA encodes a peptide or protein comprising IL-12 or a fragment or variant thereof as defined herein, wherein the at least one coding RNA comprises a nucleic acid sequence identical or at least 50%, 60%, 70%, 75%, 80%, 81%, 82%, 83%, 84%, 85%, 86%, 87%, 88%, 89%, 90%, 91%, 92%, 93%, 94%, 95%, 96%, 97%, 98%, 99% identical to a nucleic acid sequence according to SEQ ID NO: 20 or 446, preferably according to SEQ ID NO: 446, or a fragment or variant of any of these sequences.

[0393] In a particularly preferred embodiment, the at least one coding RNA encodes a peptide or protein comprising IL-12 or a fragment or variant thereof as defined herein, wherein the at least one coding RNA comprises a nucleic acid sequence according to SEQ ID NO: 21 or SEQ ID NO: 447, preferably SEQ ID NO: 447, or a fragment or variant thereof. More preferably, the at least one coding RNA encodes a peptide or protein comprising IL-12 or a fragment or variant thereof as defined herein, wherein the at least one coding RNA comprises a nucleic acid sequence identical or at least 50%, 60%, 70%, 75%, 80%, 81%, 82%, 83%, 84%, 85%, 86%, 87%, 88%, 89%, 90%, 91%, 92%, 93%, 94%, 95%, 96%, 97%, 98%, 99% identical to the nucleic acid sequence according to SEQ ID NO: 21 or SEQ ID NO: 447, preferably SEQ ID NO: 447, or a fragment or variant thereof.

[0394] According to another embodiment, the at least one coding RNA encodes a peptide or protein comprising CD40L or a fragment or variant thereof as defined herein. Preferably, the encoded peptide or protein comprises an amino acid according to SEQ ID NO: 11, or a fragment or variant thereof. More preferably, the encoded peptide or protein comprises an amino acid sequence identical or at least 50%, 60%, 70%, 75%, 80%, 81%, 82%, 83%, 84%, 85%, 86%, 87%, 88%, 89%, 90%, 91%, 92%, 93%, 94%, 95%, 96%, 97%, 98%, 99% identical to the amino acid sequence according to SEQ ID NO: 11, or a fragment or variant thereof.

[0395] In a further preferred embodiment, the at least one coding RNA encodes a peptide or protein comprising CD40L or a fragment or variant thereof as defined herein, wherein the at least one coding RNA comprises a nucleic acid sequence according to SEQ ID NO: 22 or SEQ ID NO: 448, preferably SEQ ID NO: 448, or a fragment or variant thereof. More preferably, the at least one coding RNA encodes a peptide or protein comprising CD40L or a fragment or variant thereof as defined herein, wherein the at least one coding RNA comprises a nucleic acid sequence identical or at least 50%, 60%, 70%, 75%, 80%, 81%, 82%, 83%, 84%, 85%, 86%, 87%, 88%, 89%, 90%, 91%, 92%, 93%, 94%, 95%, 96%, 97%, 98%, 99% identical to the nucleic acid sequence according to SEQ ID NO: 22 or SEQ ID NO: 448, preferably SEQ ID NO: 448, or a fragment or variant of any of these sequences.

[0396] According to an alternative embodiment, the at least one coding RNA encodes a peptide or protein comprising a decoy PD-1 receptor or a fragment or variant thereof as defined herein, more preferably a soluble PD-1 receptor or a fragment or variant thereof as defined herein. Preferably, the encoded peptide or protein comprises an amino acid according to any one of SEQ ID NO: 2 or SEQ ID NO: 1042, or a fragment or variant thereof. More preferably, the encoded peptide or protein comprises an amino acid sequence identical or at least 50%, 60%, 70%, 75%, 80%, 81%, 82%, 83%, 84%, 85%, 86%, 87%, 88%, 89%, 90%, 91%, 92%, 93%, 94%, 95%, 96%, 97%, 98%, 99% identical to the amino acid sequence according to SEQ ID NO: 2 or SEQ ID NO: 1042, or a fragment or variant thereof.

[0397] In a further preferred embodiment, the at least one coding RNA encodes a peptide or protein comprising a decoy PD-1 receptor, more preferably a soluble PD-1 receptor, or a fragment or variant thereof as defined herein, wherein the at least one coding RNA comprises a nucleic acid sequence according to SEQ ID NO: 13 or SEQ ID NO: 439, preferably SEQ ID NO: 439, or a fragment or variant thereof. More preferably, the at least one coding RNA encodes a peptide or protein comprising a decoy PD-1 receptor, more preferably a soluble PD-1 receptor, or a fragment or variant thereof as defined herein, wherein the at least one coding RNA comprises a nucleic acid sequence identical or at least 50%, 60%, 70%, 75%, 80%, 81%, 82%, 83%, 84%, 85%, 86%, 87%, 88%, 89%, 90%, 91%, 92%, 93%, 94%, 95%, 96%, 97%, 98%, 99% identical to the nucleic acid sequence according to SEQ ID NO: 13 or SEQ ID NO: 439, preferably SEQ ID NO: 439, or a fragment or variant of any of these sequences.

[0398] According to an alternative embodiment, the at least one coding RNA encodes a peptide or protein comprising a decoy PD-1 receptor or a fragment or variant thereof as defined herein, more preferably a soluble PD-1 receptor or a fragment or variant thereof as defined herein. Preferably, the encoded peptide or protein comprises an amino acid according to any one of SEQ ID NO: 1, or a fragment or variant thereof. More preferably, the encoded peptide or protein comprises an amino acid sequence identical or at least 50%, 60%, 70%, 75%, 80%, 81%, 82%, 83%, 84%, 85%, 86%, 87%, 88%, 89%, 90%, 91%, 92%, 93%, 94%, 95%, 96%, 97%, 98%, 99% identical to the amino acid sequence according to SEQ ID NO: 1, or a fragment or variant thereof.

[0399] In a further preferred embodiment, the at least one coding RNA encodes a peptide or protein comprising a decoy PD-1 receptor, more preferably a soluble PD-1 receptor, or a fragment or variant thereof as defined herein, wherein the at least one coding RNA comprises a nucleic acid sequence according to SEQ ID NO: 12 or SEQ ID NO: 438, preferably SEQ ID NO: 438, or a fragment or variant thereof. More preferably, the at least one coding RNA encodes a peptide or protein comprising a decoy PD-1 receptor, more preferably a soluble PD-1 receptor, or a fragment or variant thereof as defined herein, wherein the at least one coding RNA comprises a nucleic acid sequence identical or at least 50%, 60%, 70%, 75%, 80%, 81%, 82%, 83%, 84%, 85%, 86%, 87%, 88%, 89%, 90%, 91%, 92%, 93%, 94%, 95%, 96%, 97%, 98%, 99% identical to the nucleic acid sequence according to SEQ ID NO: 12 or SEQ ID NO: 438, preferably SEQ ID NO: 438, or a fragment or variant of any of these sequences.

[0400] According to a preferred embodiment, the at least one coding RNA encodes a peptide or protein comprising a CTLA4 antagonist as described herein. Preferably, the at least one coding RNA encodes a peptide or protein comprising an anti-CTLA4 antibody as described herein, or a fragment or variant thereof as defined herein, wherein the fragment or variant is preferably a functional fragment or a functional variant. More preferably, the at least one coding RNA encodes a peptide or protein comprising an anti-CTLA4 antibody as described herein, or a fragment or variant thereof as defined herein, wherein the at least one coding RNA comprises a nucleic acid sequence according to any one of SEQ ID NO: 646-660, 662-676, 678-692, 694-705, or 707-715, preferably according to any one of SEQ ID NO: 646-660, 679-692, or 710-715, or a fragment or variant of any one of these nucleic acid sequences. Even more preferably, the at least one coding RNA encodes a peptide or protein comprising an anti-CTLA4 antibody, or a fragment or variant thereof as defined herein, wherein the at least one coding RNA comprises a nucleic acid sequence identical or at least 50%, 60%, 70%, 75%, 80%, 81%, 82%, 83%, 84%, 85%, 86%, 87%, 88%, 89%, 90%, 91%, 92%, 93%, 94%, 95%, 96%, 97%, 98%, 99% identical to the nucleic acid sequence according to SEQ ID NO: 646-660, 662-676, 678-692, 694-705,

or 707-715, preferably according to any one of SEQ ID NO: 646-660, 679-692, or 710-715.

[0401] It is further preferred that the at least one coding RNA encodes a peptide or protein comprising a heavy chain of an anti-CTLA4 antibody, or a fragment or variant thereof, and a light chain of an anti-CTLA4 antibody, or a fragment or variant thereof, wherein the heavy chain and the light chain, or a fragment or variant thereof, is preferably as described herein.

[0402] Preferably, the at least one coding RNA encodes a peptide or protein comprising a heavy chain of an anti-CTLA4 antibody, or a fragment or variant thereof, and a light chain of an anti-CTLA4 antibody, or a fragment or variant thereof,

wherein the heavy chain, or the fragment or variant thereof, is encoded by a nucleic acid sequence selected from any one of SEQ ID NO: 646-660, 662-676, or 710-715, preferably from any one of SEQ ID NO: 646-660, or a fragment or variant of any one of these nucleic acid sequences, and
wherein the light chain, or the fragment or variant thereof, is encoded by a nucleic acid sequence selected from any one of SEQ ID NO: 678-692, 694-705, 707-709, or 710-715, preferably from any one of SEQ ID NO: 678-692, or a fragment or variant of any one of these nucleic acid sequences.

[0403] Therein, the heavy chain and the light chain, or the fragment or variant of any of these, respectively, is preferably encoded either by one and the same coding RNA or by different coding RNAs.

[0404] According to a preferred embodiment, the invention relates to the isRNA for use as described herein, wherein the use comprises—as an additional pharmaceutically active ingredient—an anti-CTLA4 antibody or a fragment or variant thereof as described herein, wherein the anti-CTLA4 antibody is provided in the form of two separate RNAs (formulated separately or together), wherein

the heavy chain of the anti-CTLA4 antibody, or a fragment or variant thereof, is encoded by an RNA comprising or consisting of a nucleic acid sequence selected from any one of SEQ ID NO: 646-660, 662-676, or 710-715, preferably from any one of SEQ ID NO: 646-660, or a fragment or variant of any one of these nucleic acid sequences, and
wherein the light chain of the anti-CTLA4 antibody, or a fragment or variant thereof, is encoded by another RNA comprising or consisting of a nucleic acid sequence selected from any one of SEQ ID NO: 678-692, 694-705, 707-709, or 710-715, preferably from any one of SEQ ID NO: 678-692, or a fragment or variant of any one of these nucleic acid sequences.

[0405] In an alternative embodiment, the invention relates to the isRNA for use as described herein, wherein the use comprises—as an additional pharmaceutically active ingredient—an anti-CTLA4 antibody or a fragment or variant thereof as described herein, wherein the anti-CTLA4 antibody, or the fragment or variant thereof, is provided in the form of an RNA, wherein one RNA encodes both, the heavy chain of the anti-CTLA4 antibody, or a fragment or variant thereof, and the light chain of the anti-CTLA4 antibody, or a fragment or variant thereof, and wherein the RNA preferably comprises or consists of a nucleic acid sequence according to any one of SEQ ID NO: 710-712, 713-715, or a fragment or variant of any one of these nucleic acid sequences.

[0406] The present invention further provides the isRNA for use in the treatment of a tumor or cancer disease as described herein, wherein the treatment comprises administration of at least one coding RNA (as additional pharmaceutically active ingredient), preferably at least one mRNA, wherein the at least one coding RNA encodes at least two peptides or proteins selected from the group consisting of
[0407] IL-12,
[0408] CD40L,
[0409] an anti-CTLA4 antibody, and
[0410] optionally, a decoy PD-1 receptor, preferably a soluble PD-1 receptor,
   or a fragment or variant of any of these, and
   wherein the IL-12, the CD40L, the decoy PD-1 receptor, or the anti-CTLA4 antibody, or a fragment or variant of any of these, is preferably as described herein.

[0411] In the context of the present invention, an anti-CTLA4 antibody as used herein may be referred to as ‘(one) peptide or protein’ (in the singular) even though the (mature) anti-CTLA4 antibody, or the fragment or variant thereof, preferably comprises at least two peptides or proteins, namely a heavy chain, or a fragment or variant thereof, and a light chain, or a fragment or variant thereof.

[0412] In certain embodiments, the treatment of a tumor or cancer disease thus comprises the administration of at least one coding RNA (as additional pharmaceutically active ingredient), preferably at least two, three, four or five coding RNAs, encoding at least two, preferably two, three or four, of the peptides or proteins, or a fragment or variant of any of these, preferably resulting in the expression of said at least two peptides or proteins, or a fragment or variant of any of these, upon administration of the at least one coding RNA to a subject.

[0413] According to a particularly preferred embodiment, the treatment of a tumor or cancer disease comprises administration of at least two or three coding RNAs (as additional pharmaceutically active ingredients), wherein each of the coding RNAs encodes a different one of a peptide or protein selected from the group consisting of
[0414] IL-12,
[0415] CD40L,
[0416] an anti-CTLA4 antibody, and
[0417] optionally, a decoy PD-1 receptor, preferably a soluble PD-1 receptor,
   or a fragment or variant of any of these, and
   wherein the IL-12, the CD40L, the decoy PD-1 receptor, or the anti-CTLA4 antibody, or a fragment or variant of any of these, is preferably as described herein.

[0418] In another embodiment, the treatment of a tumor or cancer disease comprises administration at least one coding RNA (as additional pharmaceutically active ingredient(s)), wherein the at least one coding RNA is a bi- or multicistronic RNA encoding at least one peptide or protein, preferably two, three or four peptides or proteins, selected from the group consisting of
[0419] IL-12,
[0420] CD40L,
[0421] an anti-CTLA4 antibody, and
[0422] optionally, a decoy PD-1 receptor, preferably a soluble PD-1 receptor,
   or a fragment or variant of any of these, and
   wherein the IL-12, the CD40L, the decoy PD-1 receptor, or the anti-CTLA4 antibody, or a fragment or variant of any of these, is preferably as described herein.

[0423] In this context, it was surprisingly found by the inventors that the expression of the combinations of two, preferably three or four, of the peptides or proteins defined herein is particularly beneficial in the treatment of a tumor or cancer disease, in particular when combined with the isRNA as described herein.

[0424] According to a preferred embodiment, the present invention provides the isRNA for use in the treatment of a tumor or cancer disease as described herein, wherein the treatment comprises administration of at least one coding RNA (as additional pharmaceutically active ingredient), preferably at least one mRNA, wherein

the at least one coding RNA comprises at least one coding sequence encoding a peptide or protein comprising CD40L or a fragment or variant thereof, and
the same or a different coding RNA comprises at least one coding sequence encoding a peptide or protein comprising IL 12 or a fragment or variant thereof.

[0425] In a further preferred embodiment, the present invention provides the isRNA for use in the treatment of a tumor or cancer disease as described herein, wherein the treatment comprises administration of at least one coding RNA (as additional pharmaceutically active ingredient), preferably at least one mRNA, wherein

the at least one coding RNA comprises at least one coding sequence encoding a peptide or protein comprising CD40L or a fragment or variant thereof, and
the same or a different coding RNA comprises at least one coding sequence encoding a peptide or protein comprising a decoy PD-1 receptor, preferably a soluble PD-1 receptor, or a fragment or variant thereof.

[0426] According to another embodiment, the present invention provides the isRNA for use in the treatment of a tumor or cancer disease as described herein, wherein the treatment comprises administration of at least one coding RNA (as additional pharmaceutically active ingredient), preferably at least one mRNA, wherein

the at least one coding RNA comprises at least one coding sequence encoding a peptide or protein comprising IL 12 or a fragment or variant thereof, and
the same or a different coding RNA comprises at least one coding sequence encoding a peptide or protein comprising a decoy PD 1 receptor, preferably a soluble PD-1 receptor, or a fragment or variant thereof.

[0427] According to a preferred embodiment, the present invention provides the isRNA for use in the treatment of a tumor or cancer disease as described herein, wherein the treatment comprises administration of at least one coding RNA (as additional pharmaceutically active ingredient), preferably at least one mRNA, wherein

the at least one coding RNA comprises at least one coding sequence encoding a peptide or protein comprising IL12 or a fragment or variant thereof, and
the same or a different coding RNA comprises at least one coding sequence encoding a peptide or protein comprising an anti-CTLA4 antibody or a fragment or variant thereof.

[0428] According to a preferred embodiment, the present invention provides the isRNA for use in the treatment of a tumor or cancer disease as described herein, wherein the treatment comprises administration of at least one coding RNA (as additional pharmaceutically active ingredient), preferably at least one mRNA, wherein

the at least one coding RNA comprises at least one coding sequence encoding a peptide or protein comprising CD40L or a fragment or variant thereof, and
the same or a different coding RNA comprises at least one coding sequence encoding a peptide or protein comprising an anti-CTLA4 antibody or a fragment or variant thereof.

[0429] According to a preferred embodiment, the present invention provides the isRNA for use in the treatment of a tumor or cancer disease as described herein, wherein the treatment comprises administration of at least one coding RNA (as additional pharmaceutically active ingredient), preferably at least one mRNA, wherein

the at least one coding RNA comprises at least one coding sequence encoding a peptide or protein comprising a decoy PD 1 receptor, preferably a soluble PD-1 receptor, or a fragment or variant thereof, and
the same or a different coding RNA comprises at least one coding sequence encoding a peptide or protein comprising an anti-CTLA4 antibody or a fragment or variant thereof.

[0430] In a particularly preferred embodiment, the present invention provides the isRNA for use in the treatment of a tumor or cancer disease as described herein, wherein the treatment comprises administration of at least one coding RNA (as additional pharmaceutically active ingredient), preferably at least one mRNA, wherein

the at least one coding RNA comprises at least one coding sequence encoding a peptide or protein comprising IL-12 or a fragment or variant thereof,
the same or a different coding RNA comprises at least one coding sequence encoding a peptide or protein comprising a decoy PD 1 receptor, preferably a soluble PD-1 receptor, or a fragment or variant thereof, and
the same or a different coding RNA comprises at least one coding sequence encoding a peptide or protein comprising CD40L or a fragment or variant thereof.

[0431] In that embodiment, the coding sequence encoding a peptide or protein comprising IL-12 or a fragment or variant thereof, the coding sequence encoding a peptide or protein comprising a decoy PD 1 receptor, preferably a soluble PD-1 receptor, or a fragment or variant thereof, and the coding sequence encoding a peptide or protein comprising CD40L or a fragment or variant thereof may preferably be located on a separate coding RNA, preferably a separate mRNA. Alternatively, at least two of the coding sequences encoding a peptide or protein comprising IL-12 or a fragment or variant thereof, encoding a peptide or protein comprising a decoy PD 1 receptor, preferably a soluble PD-1 receptor, or a fragment or variant thereof, and encoding a peptide or protein comprising CD40L or a fragment or variant thereof, are located on the same coding RNA, which is preferably a bi- or multicistronic RNA.

[0432] According to certain preferred embodiments, the present invention provides the isRNA for use in the treatment of a tumor or cancer disease as described herein, wherein the treatment comprises administration of at least one coding RNA (as additional pharmaceutically active ingredient), preferably at least one mRNA, wherein

the at least one coding RNA comprises at least one coding sequence encoding a peptide or protein comprising or consisting of IL-12 or a fragment or variant thereof,
the same or a different coding RNA comprises at least one coding sequence encoding a peptide or protein comprising or consisting of CD40L or a fragment or variant thereof, and
the same or a different coding RNA comprises at least one coding sequence encoding a peptide or protein comprising or consisting of an anti-CTLA4 antibody, preferably as described herein, or a fragment or variant thereof.

[0433] This embodiment is particularly preferred if the patient receives or has received a treatment with a PD-1 antagonist or a PD-L1 antagonist, such as an anti-PD-1 or anti-PD-L1 antibody.

[0434] According to certain preferred embodiments, the present invention provides the isRNA for use in the treatment of a tumor or cancer disease as described herein, wherein the treatment comprises administration of at least one coding RNA (as additional pharmaceutically active ingredient), preferably at least one mRNA, wherein

the at least one coding RNA comprises at least one coding sequence encoding a peptide or protein comprising or consisting of IL-12 or a fragment or variant thereof,
the same or a different coding RNA comprises at least one coding sequence encoding a peptide or protein comprising or consisting of a decoy PD 1 receptor, preferably a soluble PD-1 receptor, or a fragment or variant thereof,
the same or a different coding RNA comprises at least one coding sequence encoding a peptide or protein comprising or consisting of CD40L or a fragment or variant thereof, and
the same or a different coding RNA comprises at least one coding sequence encoding a peptide or protein comprising or consisting of an anti-CTLA4 antibody, preferably as described herein, or a fragment or variant thereof.

[0435] This embodiment is particularly preferred if the patient does not receive or has not received a treatment with a PD-1 antagonist or a PD-L1 antagonist, such as an anti PD-1 or anti-PD-L1 antibody.

[0436] In these embodiments, the coding sequence encoding a peptide or protein comprising or consisting of IL-12 or a fragment or variant thereof, optionally the coding sequence encoding a peptide or protein comprising or consisting of a decoy PD 1 receptor, preferably a soluble PD-1 receptor, or a fragment or variant thereof, the coding sequence encoding a peptide or protein comprising or consisting of CD40L or a fragment or variant thereof, and the coding sequence encoding a peptide or protein comprising or consisting of an anti-CTLA4 antibody or a fragment or variant thereof, may preferably be located on a separate coding RNA, preferably a separate mRNA. Alternatively, at least two of the coding sequences encoding a peptide or protein comprising or consisting of IL-12 or a fragment or variant thereof, the coding sequence encoding a peptide or protein comprising or consisting of a decoy PD 1 receptor, preferably a soluble PD-1 receptor, or a fragment or variant thereof, the coding sequence encoding a peptide or protein comprising or consisting of CD40L or a fragment or variant thereof, and the coding sequence encoding a peptide or protein comprising or consisting of an anti-CTLA4 antibody or a fragment or variant thereof, are located on the same coding RNA, which is preferably a bi- or multicistronic RNA.

[0437] In some embodiments, the present invention provides the isRNA for use in the treatment of a tumor or cancer disease as described herein, wherein the treatment comprises administration of at least one coding RNA (as additional pharmaceutically active ingredient), preferably at least one mRNA, wherein

the at least one coding RNA comprises at least one coding sequence encoding a peptide or protein comprising or consisting of IL-12 or a fragment or variant thereof,
the same or a different coding RNA comprises at least one coding sequence encoding a peptide or protein comprising or consisting of CD40L or a fragment or variant thereof, and
the same or a different coding RNA comprises at least one coding sequence encoding a peptide or protein comprising or consisting of an anti-CTLA4 antibody, preferably as described herein, or a fragment or variant thereof.

[0438] In these embodiments, the coding sequence encoding a peptide or protein comprising or consisting of IL-12 or a fragment or variant thereof, the coding sequence encoding a peptide or protein comprising or consisting of CD40L or a fragment or variant thereof, and the coding sequence encoding a peptide or protein comprising or consisting of an anti-CTLA4 antibody or a fragment or variant thereof, may preferably be located on a separate coding RNA, preferably a separate mRNA. Alternatively, at least two of the coding sequences encoding a peptide or protein comprising or consisting of IL-12 or a fragment or variant thereof, the coding sequence encoding a peptide or protein comprising or consisting of CD40L or a fragment or variant thereof, and the coding sequence encoding a peptide or protein comprising or consisting of an anti-CTLA4 antibody or a fragment or variant thereof, are located on the same coding RNA, which is preferably a bi- or multicistronic RNA.

[0439] In a preferred embodiment, the present invention provides the isRNA for use in the treatment of a tumor or cancer disease as described herein, wherein the treatment comprises administration of at least one coding RNA (as additional pharmaceutically active ingredient), preferably at least one mRNA, wherein the at least one coding sequence encodes at least one tumor antigen or a fragment or variant thereof. Preferably the coding sequence comprises at least one nucleic acid sequence preferably selected from the group consisting of SEQ ID Nos. 505-4033; 4561-4591 of PCT/EP2017/059525, or a fragment or variant of any one of said sequences

[0440] In a preferred embodiment, the present invention provides the isRNA for use in the treatment of a tumor or cancer disease as described herein, wherein the treatment comprises administration of at least one coding RNA (as additional pharmaceutically active ingredient), preferably at least one mRNA, wherein the at least one coding sequence comprises
[0441] a) a nucleic acid sequence selected from the group consisting of SEQ ID NO: 14 to 19 or SEQ ID NOs: 440 to 445 or 447, preferably from the group consisting of SEQ ID NOs: 440 to 445 or 447, or a fragment or variant of any of these sequences, preferably a nucleic acid sequence according to SEQ ID NO: 21 or SEQ ID NO: 447, preferably SEQ ID NO: 447, or a fragment or variant of any of these sequences;
[0442] b) a nucleic acid sequence according to SEQ ID NO: 22 or SEQ ID NO: 448, preferably SEQ ID NO: 448, or a fragment or variant thereof,
[0443] c) a nucleic acid sequence according to any one of SEQ ID NO: 646-660 or 662-676, preferably according to any one of SEQ ID NO: 646-660, or a fragment or variant of any one of these nucleic acid sequences, and a nucleic acid sequence according to any one of SEQ ID NO: 678-692, 694-705 or 707-709, preferably according to any one of SEQ ID NO: 678-692, or a fragment or variant of any of these nucleic acid sequences;
   [0444] or
   [0445] a nucleic acid sequence according to any one of SEQ ID NO: 710-712 or 713-715, or a fragment or variant of any of these nucleic acid sequences, and/or
[0446] d) optionally, a nucleic acid sequence according to SEQ ID NO: 13 or SEQ ID NO: 439, preferably SEQ ID NO: 439, or a fragment or variant thereof.

[0447] According to one embodiment, the at least one coding RNA or the isRNA as described herein may be in the form of a modified RNA, wherein any modification as defined herein, may be introduced into the at least one coding RNA or into the isRNA as described herein. According to a preferred embodiment, the at least one coding RNA as described herein comprises at least one coding sequence comprising a nucleic acid sequence that is modified compared to the nucleic acid sequence of the coding sequence of the corresponding wild type RNA, and wherein the amino acid sequence encoded by said coding sequence is preferably not modified compared to the amino acid sequence encoded by the coding sequence of the corresponding wild type RNA. Modifications as defined herein preferably lead to a stabilization of the at least one coding RNA as used herein.

[0448] In a further preferred embodiment, the present invention thus provides the isRNA for use in the treatment of a tumor or cancer disease as described herein, wherein the treatment comprises administration of at least one coding RNA (as additional pharmaceutically active ingredient), preferably at least one mRNA, wherein the at least one coding sequence comprises
[0449] a) a nucleic acid sequence selected from the group consisting of SEQ ID NOs: 14-19; 440-445; 447; 25-30; 36-41; 47-52; 58-63; 69-74; 80-85; 91-96; 102-107; 113-118; 124-129; 135-140; 601-606; 612-617; 623-628; 716-725; 727; 1018-1021 and 1059-1062, or a fragment or variant of any of these sequences, preferably from the group consisting of SEQ ID NOs: 21; 447; 32; 43; 54; 65; 76; 87; 98; 109; 120; 131; 142; 608; 619; 630; 632-644; 726 and 1058, or a fragment or variant of any of these sequences;
[0450] b) a nucleic acid sequence selected from the group consisting of SEQ ID NOs: 22; 448; 33; 44; 55; 66; 77; 88; 99; 110; 121; 132; 143; 609; 620; 631; 728-738 and 1025-1028, or a fragment or variant of any of these sequences;
[0451] c) a nucleic acid sequence according to any one of SEQ ID NO: 646-660; 662-676 or 1029-1036, preferably according to any one of SEQ ID NO: 646-660, or a fragment or variant of any one of these nucleic acid sequences, and a nucleic acid sequence according to any one of SEQ ID NO: 678-692, 694-705; 707-709 or 1037-1041, preferably according to any one of SEQ ID NO: 678-692, or a fragment or variant of any of these nucleic acid sequences;
   [0452] or
   [0453] a nucleic acid sequence according to any one of SEQ ID NO: 710-712 or 713-715, or a fragment or variant of any of these nucleic acid sequences, and/or
[0454] d) optionally, a nucleic acid sequence selected from the group consisting of SEQ ID NOs: 12; 438; 23; 34; 45; 56; 67; 78; 89; 100; 111; 122; 133; 599; 610; 621 and 1022-1024, or a fragment or variant of any of these sequences, preferably from the group consisting of SEQ ID NOs: 13, 439; 24; 439; 35; 46; 57; 68; 79; 90; 101; 112; 123; 134; 600; 611; 622 and 1043-1054, or a fragment or variant of any of these sequences.

[0455] In a preferred embodiment, the present invention thus provides the isRNA for use in the treatment of a tumor or cancer disease as described herein, wherein the treatment comprises administration of at least one coding RNA (as additional pharmaceutically active ingredient), preferably at least one mRNA, wherein the at least one coding sequence comprises
[0456] a) a nucleic acid sequence selected from the group consisting of SEQ ID NOs: 25-30; 36-41; 47-52; 58-63; 69-74; 80-85; 91-96; 102-107; 113-118; 124-129; 135-140; 601-606; 612-617; 623-628; 716-725; 727; 1018-1021 and 1059-1062, or a fragment or variant of any of these sequences, preferably from the group consisting of SEQ ID NOs: 32; 43; 54; 65; 76; 87; 98; 109; 120; 131; 142; 608; 619; 630; 632-644; 726 and 1058, or a fragment or variant of any of these sequences;
[0457] b) a nucleic acid sequence selected from the group consisting of SEQ ID NOs: 33; 44; 55; 66; 77; 88; 99; 110; 121; 132; 143; 609; 620; 631; 728-738; 1025-1028 and 1025-1028, or a fragment or variant of any of these sequences;
[0458] c) a nucleic acid sequence according to any one of SEQ ID NO: 646-660; 662-676 or 1029-1036, preferably according to any one of SEQ ID NO: 646-660, or a fragment or variant of any one of these nucleic acid sequences, and a nucleic acid sequence according to any one of SEQ ID NO: 678-692, 694-705; 707-709 or 1037-1041, preferably according to any one of SEQ ID NO: 678-692, or a fragment or variant of any of these nucleic acid sequences;
   [0459] or
   [0460] a nucleic acid sequence according to any one of SEQ ID NO: 710-712 or 713-715, or a fragment or variant of any of these nucleic acid sequences, and/or
[0461] d) optionally, a nucleic acid sequence selected from the group consisting of SEQ ID NOs: 23; 34; 45; 56; 67; 78; 89; 100; 111; 122; 133; 599; 610; 621; 1022-1024, or a fragment or variant of any of these sequences, preferably from the group consisting of SEQ ID NOs: 24; 35; 46; 57; 68; 79; 90; 101; 112; 123; 134; 600; 611; 622 and 1043-1054, or a fragment or variant of any of these sequences.

[0462] In this context, a coding RNA as used herein comprising at least one coding sequence that comprises a (wild type or modified) nucleic acid sequence encoding IL-12 or a fragment or variant thereof as described herein, may preferably comprise a nucleic acid sequence according to any of SEQ ID NOs: 20; 31; 42; 53; 64; 75; 86; 97; 108; 119; 130; 141; 446; 607; 618 or 629, or a fragment or variant of any of these sequences.

[0463] According to one embodiment, the at least one coding RNA as described herein may thus be provided as a “stabilized RNA”, that is to say as an RNA that is essentially resistant to in vivo degradation (e.g. by an exo- or endo-nuclease). Such stabilization can be effected, for example, by a modified phosphate backbone of the at least one coding RNA as used herein. A backbone modification in connection with the present invention is a modification in which phosphates of the backbone of the nucleotides contained in the RNA are chemically modified. Nucleotides that may be preferably used in this connection contain e.g. a phosphorothioate-modified phosphate backbone, preferably at least one of the phosphate oxygens contained in the phosphate backbone being replaced by a sulfur atom. Stabilized RNAs may further include, for example: non-ionic phosphate analogues, such as, for example, alkyl and aryl phosphonates, in which the charged phosphonate oxygen is replaced by an alkyl or aryl group, or phosphodiesters and alkylphosphotriesters, in which the charged oxygen residue is present in alkylated form. Such backbone modifications typically include, without implying any limitation, modifications from the group consisting of methylphosphonates, phosphoramidates and phosphorothioates (e.g. cytidine-5′-O-(1-thiophosphate)).

[0464] In the following, specific modifications are described, which are preferably capable of “stabilizing” the at least one coding RNA as defined herein.

[0465] Chemical Modifications:

[0466] The term “RNA modification” as used herein may refer to chemical modifications comprising backbone modifications as well as sugar modifications or base modifications.

[0467] In this context, a modified RNA as defined herein may contain nucleotide analogues/modifications, e.g. backbone modifications, sugar modifications or base modifications. A backbone modification in connection with the present invention is a modification, in which phosphates of the backbone of the nucleotides contained in an RNA as defined herein are chemically modified. A sugar modification in connection with the present invention is a chemical modification of the sugar of the nucleotides of the RNA as defined herein. Furthermore, a base modification in connection with the present invention is a chemical modification of the base moiety of the nucleotides of the RNA. In this context, nucleotide analogues or modifications are preferably selected from nucleotide analogues, which are applicable for transcription and/or translation.

[0468] Sugar Modifications:

[0469] The modified nucleosides and nucleotides, which may be incorporated into a modified RNA as described herein, can be modified in the sugar moiety. For example, the 2′ hydroxyl group (OH) can be modified or replaced with a number of different “oxy” or “deoxy” substituents. Examples of “oxy”-2′ hydroxyl group modifications include, but are not limited to, alkoxy or aryloxy (—OR, e.g., R=H, alkyl, cycloalkyl, aryl, aralkyl, heteroaryl or sugar); polyethyleneglycols (PEG), —O(CH₂CH₂O)nCH₂CH₂OR; “locked” nucleic acids (LNA) in which the 2′ hydroxyl is connected, e.g., by a methylene bridge, to the 4′ carbon of the same ribose sugar; and amino groups (—O-amino, wherein the amino group, e.g., NRR, can be alkylamino, dialkylamino, heterocyclyl, arylamino, diarylamino, heteroarylamino, or diheteroaryl amino, ethylene diamine, polyamino) or aminoalkoxy.

[0470] “Deoxy” modifications include hydrogen, amino (e.g. NH₂; alkylamino, dialkylamino, heterocyclyl, arylamino, diaryl amino, heteroaryl amino, diheteroaryl amino, or amino acid); or the amino group can be attached to the sugar through a linker, wherein the linker comprises one or more of the atoms C, N, and O.

[0471] The sugar group can also contain one or more carbons that possess the opposite stereochemical configuration than that of the corresponding carbon in ribose. Thus, a modified RNA can include nucleotides containing, for instance, arabinose as the sugar.

[0472] Backbone Modifications:

[0473] The phosphate backbone may further be modified in the modified nucleosides and nucleotides, which may be incorporated into a modified RNA as described herein. The phosphate groups of the backbone can be modified by replacing one or more of the oxygen atoms with a different substituent. Further, the modified nucleosides and nucleotides can include the full replacement of an unmodified phosphate moiety with a modified phosphate as described herein. Examples of modified phosphate groups include, but are not limited to, phosphorothioate, phosphoroselenates, borano phosphates, borano phosphate esters, hydrogen phosphonates, phosphoroamidates, alkyl or aryl phosphonates and phosphotriesters. Phosphorodithioates have both non-linking oxygens replaced by sulfur. The phosphate linker can also be modified by the replacement of a linking oxygen with nitrogen (bridged phosphoroamidates), sulfur (bridged phosphorothioates) and carbon (bridged methylene-phosphonates).

[0474] Base Modifications:

[0475] The modified nucleosides and nucleotides, which may be incorporated into a modified RNA as described herein can further be modified in the nucleobase moiety. Examples of nucleobases found in RNA include, but are not limited to, adenine, guanine, cytosine and uracil. For example, the nucleosides and nucleotides described herein can be chemically modified on the major groove face. In some embodiments, the major groove chemical modifications can include an amino group, a thiol group, an alkyl group, or a halo group.

[0476] In particularly preferred embodiments of the present invention, the nucleotide analogues/modifications are selected from base modifications, which are preferably selected from 2-amino-6-chloropurineriboside-5′-triphosphate, 2-Aminopurine-riboside-5′-triphosphate; 2-aminoadenosine-5′-triphosphate, 2′-Amino-2′-deoxycytidine-triphosphate, 2-thiocytidine-5′-triphosphate, 2-thiouridine-5′-triphosphate, 2′-Fluorothymidine-5′-triphosphate, 2′-O-Methyl inosine-5′-triphosphate 4-thiouridine-5′-triphosphate, 5-aminoallylcytidine-5′-triphosphate, 5-aminoallyluridine-5′-triphosphate, 5-bromocytidine-5′-triphosphate, 5-bromouridine-5′-triphosphate, 5-Bromo-2′-deoxycytidine-5′-triphosphate, 5-Bromo-2′-deoxyuridine-5′-triphosphate, 5-iodocytidine-5′-triphosphate, 5-Iodo-2′-deoxycytidine-5′-triphosphate, 5-iodouridine-5′-triphosphate, 5-Iodo-2′-deoxyuridine-5′-triphosphate, 5-methylcytidine-5′-triphosphate, 5-methyluridine-5′-triphosphate, 5-Propynyl-2′-deoxycytidine-5′-triphosphate, 5-Propynyl-2′-deoxyuridine-5′-triphosphate, 6-azacytidine-5′-triphosphate, 6-azauridine-5′-triphosphate, 6-chloropurineriboside-5′-triphosphate, 7-deazaadenosine-5′-triphosphate, 7-deazaguanosine-5′-triphosphate, 8-azaadenosine-5′-triphosphate, 8-azidoadenosine-5′-triphosphate, benzimidazole-riboside-5′-triphosphate, N1-methyladenosine-5′-triphosphate, N1-methylguanosine-5′-triphosphate, N6-methyladenosine-5′-triphosphate, O6-methylguanosine-5′-triphosphate, pseudouridine-5′-triphosphate, or puromycin-5′-triphosphate, xanthosine-5′-triphosphate. Particular preference is given to nucleotides for base modifications selected from the group of base-modified nucleotides consisting of 5-methylcytidine-5′-triphosphate, 7-deazaguanosine-5′-triphosphate, 5-bromocytidine-5′-triphosphate, and pseudouridine-5′-triphosphate.

[0477] In some embodiments, modified nucleosides include pyridin-4-one ribonucleoside, 5-aza-uridine, 2-thio-5-aza-uridine, 2-thiouridine, 4-thio-pseudouridine, 2-thio-pseudouridine, 5-hydroxyuridine, 3-methyluridine, 5-carboxymethyl-uridine, 1-carboxymethyl-pseudouridine, 5-propynyl-uridine, 1-propynyl-pseudouridine, 5-taurinomethyluridine, 1-taurinomethyl-pseudouridine, 5-taurinomethyl-2-thio-uridine, 1-taurinomethyl-4-thio-uridine, 5-methyl-uridine, 1-methyl-pseudouridine, 4-thio-1-methyl-pseudouridine, 2-thio-1-methyl-pseudouridine, 1-methyl-1-deaza-pseudouridine, 2-thio-1-methyl-1-deaza-pseudouridine, dihydrouridine, dihydropseudouridine, 2-thio-dihydrouridine, 2-thio-dihydropseudouridine, 2-methoxyuridine, 2-methoxy-4-thio-uridine, 4-methoxy-pseudouridine, and 4-methoxy-2-thio-pseudouridine.

[0478] In some embodiments, modified nucleosides include 5-aza-cytidine, pseudoisocytidine, 3-methylcytidine, N4-acetylcytidine, 5-formylcytidine, N4-methylcytidine, 5-hydroxymethylcytidine, 1-methyl-pseudoisocytidine, pyrrolo-cytidine, pyrrolo-pseudoisocytidine, 2-thio-cytidine, 2-thio-5-methyl-cytidine, 4-thio-pseudoisocytidine, 4-thio-1-methyl-pseudoisocytidine, 4-thio-1-methyl-1-deaza-pseudoisocytidine, 1-methyl-1-deaza-pseudoisocytidine, zebularine, 5-aza-zebularine, 5-methyl-zebularine, 5-aza-2-thio-zebularine, 2-thio-zebularine, 2-methoxy-cytidine, 2-methoxy-5-methyl-cytidine, 4-methoxy-pseudoisocytidine, and 4-methoxy-1-methyl-pseudoisocytidine.

[0479] In other embodiments, modified nucleosides include 2-aminopurine, 2,6-diaminopurine, 7-deaza-adenine, 7-deaza-8-aza-adenine, 7-deaza-2-aminopurine, 7-deaza-8-aza-2-aminopurine, 7-deaza-2,6-diaminopurine, 7-deaza-8-aza-2,6-diaminopurine, 1-methyladenosine, N6-methyladenosine, N6-isopentenyladenosine, N6-(cis-hydroxyisopentenyl)adenosine, 2-methylthio-N6-(cis-hydroxyisopentenyl) adenosine, N6-glycinylcarbamoyladenosine, N6-threonylcarbamoyladenosine, 2-methylthio-N6-threonyl carbamoyladenosine, N6,N6-dimethyladenosine, 7-methyladenine, 2-methylthio-adenine, and 2-methoxy-adenine.

[0480] In other embodiments, modified nucleosides include inosine, 1-methyl-inosine, wyosine, wybutosine, 7-deaza-guanosine, 7-deaza-8-aza-guanosine, 6-thio-guanosine, 6-thio-7-deaza-guanosine, 6-thio-7-deaza-8-aza-guanosine, 7-methyl-guanosine, 6-thio-7-methyl-guanosine, 7-methylinosine, 6-methoxy-guanosine, 1-methylguanosine, N2-methylguanosine, N2,N2-dimethylguanosine, 8-oxo-guanosine, 7-methyl-8-oxo-guanosine, 1-methyl-6-thio-guanosine, N2-methyl-6-thio-guanosine, and N2,N2-dimethyl-6-thio-guanosine.

[0481] In some embodiments, the nucleotide can be modified on the major groove face and can include replacing hydrogen on C-5 of uracil with a methyl group or a halo group.

[0482] In specific embodiments, a modified nucleoside is 5′-O-(1-thiophosphate)-adenosine, 5′-O-(1-thiophosphate)-cytidine, 5′-O-(1-thiophosphate)-guanosine, 5′-O-(1-thiophosphate)-uridine or 5′-O-(1-thiophosphate)-pseudouridine.

[0483] In further specific embodiments, a modified RNA as described herein may comprise nucleoside modifications selected from 6-aza-cytidine, 2-thio-cytidine, α-thio-cytidine, Pseudo-iso-cytidine, 5-aminoallyl-uridine, 5-iodo-uridine, N1-methyl-pseudouridine, 5,6-dihydrouridine, α-thio-uridine, 4-thio-uridine, 6-aza-uridine, 5-hydroxy-uridine, deoxy-thymidine, 5-methyl-uridine, Pyrrolo-cytidine, inosine, α-thio-guanosine, 6-methyl-guanosine, 5-methyl-cytdine, 8-oxo-guanosine, 7-deaza-guanosine, N1-methyl-adenosine, 2-amino-6-Chloro-purine, N6-methyl-2-amino-purine, Pseudo-iso-cytidine, 6-Chloro-purine, N6-methyl-adenosine, α-thio-adenosine, 8-azido-adenosine, 7-deaza-adenosine.

[0484] Lipid Modification:

[0485] According to a further embodiment, a modified RNA as defined herein can contain a lipid modification. Such a lipid-modified RNA typically comprises an RNA as defined herein, preferably a coding RNA as described herein. Such a lipid-modified RNA as defined herein typically further comprises at least one linker covalently linked with that RNA, and at least one lipid covalently linked with the respective linker. Alternatively, the lipid-modified RNA comprises at least one RNA as defined herein, preferably a coding RNA as described herein, and at least one (bifunctional) lipid covalently linked (without a linker) with that RNA. According to a third alternative, the lipid-modified RNA comprises an RNA molecule as defined herein, preferably a coding RNA as described herein, at least one linker covalently linked with that RNA, and at least one lipid covalently linked with the respective linker, and also at least one (bifunctional) lipid covalently linked (without a linker) with that RNA. In this context, it is particularly preferred that the lipid modification is present at the terminal ends of a linear RNA sequence.

[0486] G/C Content Optimization:

[0487] According to an especially preferred embodiment of the invention, the at least one coding RNA as described herein is modified. Preferably the RNA is stabilized by modifying and preferably increasing the G (guanosine)/C (cytosine) content of at least one coding region thereof. Therein, the G/C content of the RNA of the coding region is increased compared to the G/C content of the coding region of its particular wild type coding sequence, i.e. the corresponding unmodified RNA. However, the encoded amino acid sequence of the RNA is preferably not modified compared to the encoded amino acid sequence of the particular wild type/unmodified RNA.

[0488] The modification of the G/C-content of the at least one coding RNA as described herein is based on the fact that RNA sequences having an increased G (guanosine)/C (cytosine) content are typically more stable than RNA sequences having an increased A (adenosine)/U (uracil) content. The codons of a coding sequence or a whole RNA might therefore be varied compared to the wild type coding sequence or RNA, such that they include an increased amount of G/C nucleotides, while the translated amino acid sequence is preferably retained. In respect to the fact that several codons code for one and the same amino acid (so-called degeneration of the genetic code), the most favourable codons for the stability can be determined (so-called alternative codon usage). Depending on the amino acid to be encoded by the at least one RNA, there are various possibilities for modification of the RNA sequence, compared to its wild type sequence. In the case of amino acids which are encoded by codons, which contain exclusively G or C nucleotides, no modification of the codon is necessary. Thus, the codons for Pro (CCC or CCG), Arg (CGC or CGG), Ala (GCC or GCG) and Gly (GGC or GGG) require no modification, since no A or U is present. In contrast, codons which contain A and/or U nucleotides can be modified by substitution of other codons, which code for the same amino acids but contain no A and/or U. Examples of these are: the codons for Pro can be modified from CCU or CCA to CCC or CCG; the codons for Arg can be modified from CGU or CGA or AGA or AGG to CGC or CGG; the codons for Ala can be modified from GCU or GCA to GCC or GCG; the codons for Gly can be modified from GGU or GGA to GGC or GGG. In other cases, although A or U nucleotides cannot be eliminated from the codons, it is however possible to decrease the A and U content by using codons which contain a lower content of A and/or U nucleotides. Examples of these are: the codons for Phe can be modified from UUU to UUC; the codons for Leu can be modified from UUA, UUG, CUU or CUA to CUC or CUG; the codons for Ser can be modified from UCU or UCA or AGU to UCC, UCG or AGC; the codon for Tyr can be modified from UAU to UAC; the codon for Cys can be modified from UGU to UGC; the codon for His can be modified from CAU to CAC; the codon for Gin can be modified from CAA to CAG; the codons for Ile can be modified from AUU or AUA to AUC; the codons for Thr can be modified from ACU or ACA to ACC or ACG; the codon for Asn can be modified from AAU to AAC; the codon for Lys can be modified from AAA to AAG; the codons for Val can be modified from GUU or GUA to GUC or GUG; the codon for Asp can be modified from GAU to GAC; the codon for Glu can be modified from GAA to GAG; the stop codon UAA can be modified to UAG or UGA. In the case of the codons for Met (AUG) and Trp (UGG), on the other hand, there is no possibility of sequence modification. The substitutions listed above can be used either individually or in all possible combinations to increase the G/C content of the at least one mRNA of the composition of the present invention compared to its particular wild type mRNA (i.e. the original sequence). Thus, for example, all codons for Thr occurring in the wild type sequence can be modified to ACC (or ACG). Preferably, however, for example, combinations of the above substitution possibilities are used:

substitution of all codons coding for Thr in the original sequence (wild type mRNA) to ACC (or ACG) and
substitution of all codons originally coding for Ser to UCC (or UCG or AGC); substitution of all codons coding for Ile in the original sequence to AUC and
substitution of all codons originally coding for Lys to AAG and
substitution of all codons originally coding for Tyr to UAC; substitution of all codons coding for Val in the original sequence to GUC (or GUG) and
substitution of all codons originally coding for Glu to GAG and
substitution of all codons originally coding for Ala to GCC (or GCG) and
substitution of all codons originally coding for Arg to CGC (or CGG) and
substitution of all codons originally coding for Gly to GGC (or GGG) and
substitution of all codons originally coding for Asn to AAC and
substitution of all codons originally coding for Phe to UUC and
substitution of all codons originally coding for Cys to UGC and
substitution of all codons originally coding for Leu to CUG (or CUC) and
substitution of all codons originally coding for Gin to CAG and
substitution of all codons originally coding for Pro to CCC (or CCG) and
substitution of all codons originally coding for His to CAC and
substitution of all codons originally coding for Asp to GAC and
substitution of all codons originally coding for the stop codon to UGA (or UAG); etc.

[0489] Preferably, the G/C content of the coding region of the at least one coding RNA as described herein is increased by at least 7%, more preferably by at least 15%, particularly preferably by at least 20%, compared to the G/C content of the coding region of the wild type RNA. According to a specific embodiment at least 5%, 10%, 20%, 30%, 40%, 50%, 60%, more preferably at least 70%, even more preferably at least 80% and most preferably at least 90%, 95% or even 100% of the substitutable codons in the region coding for a protein or peptide as defined herein or its fragment or variant thereof or the whole sequence of the wild type RNA sequence or coding sequence are substituted, thereby increasing the G/C content of said sequence. In this context, it is particularly preferable to increase the G/C content of the at least one coding RNA as described herein to the maximum (i.e. 100% of the substitutable codons), in particular in the coding region, compared to the wild type sequence.

[0490] According to the invention, a further preferred modification of the coding sequence of the at least one coding RNA is based on the finding that the translation efficiency is also determined by a different frequency in the occurrence of tRNAs in cells. Thus, if so-called “rare codons” are present in the at least one coding region of the at least one coding RNA as described herein to an increased extent, the corresponding modified at least one coding RNA is translated to a significantly poorer degree than in the case where codons encoding relatively “frequent” tRNAs are present. According to the invention, in the modified at least one coding RNA as described herein, the region which encodes one of the above defined peptides or proteins is modified compared to the corresponding region of the wild type RNA such that at least one codon of the wild type sequence, which encodes a tRNA which is relatively rare in the cell, is exchanged for a codon, which encodes a tRNA which is relatively frequent in the cell and carries the same amino acid as the relatively rare tRNA. By this modification, the sequence of the at least one coding region of the at least one coding RNA as described herein is modified such that codons for which frequently occurring tRNAs are available are inserted. In other words, according to the invention, by this modification all codons of the wild type sequence which code for a tRNA which is relatively rare in the cell can in each case be exchanged for a codon which codes for a tRNA which is relatively frequent in the cell and which, in each case, carries the same amino acid as the relatively rare tRNA. Which tRNAs occur relatively frequently in the cell and which, in contrast, occur relatively rarely is known to a person skilled in the art; cf. e.g. Akashi, Curr. Opin. Genet. Dev. 2001, 11(6): 660-666. The codons which use for the particular amino acid the tRNA which occurs the most frequently, e.g. the Gly codon, which uses the tRNA, which occurs the most frequently in the (human) cell, are particularly preferred. According to the invention, it is particularly preferable to link the sequential G/C content which is increased, in particular maximized, in the modified at least one coding RNA as described herein, with the “frequent” codons without modifying the amino acid sequence of the protein encoded by the coding region of the RNA. This preferred embodiment allows provision of a particularly efficiently translated and stabilized (modified) at least one coding RNA as described herein. The determination of a modified at least one coding RNA as described herein (increased G/C content; exchange of tRNAs) can be carried out using the computer program explained in WO 02/098443—the disclosure content of which is included in its full scope in the present invention. Using this computer program, the nucleotide sequence of any desired coding RNA can be modified with the aid of the genetic code or the degenerative nature thereof such that a maximum G/C content results, in combination with the use of codons which code for tRNAs occurring as frequently as possible in the cell, the amino acid sequence coded by the modified at least one coding RNA preferably not being modified compared to the non-modified sequence. Alternatively, it is also possible to modify only the G/C content or only the codon usage compared to the original sequence. The source code in Visual Basic 6.0 (development environment used: Microsoft Visual Studio Enterprise 6.0 with Servicepack 3) is also described in WO 02/098443. In a further preferred embodiment of the present invention, the A/U content in the environment of the ribosome binding site of the at least one coding RNA as described herein is increased compared to the A/U content in the environment of the ribosome binding site of its particular wild type RNA. This modification (an increased A/U content around the ribosome binding site) increases the efficiency of ribosome binding to the at least one RNA. An effective binding of the ribosomes to the ribosome binding site (Kozak sequence: GCCGCCACCAUGG (SEQ ID NO: 429), the AUG forms the start codon) in turn has the effect of an efficient translation of the at least one coding RNA. According to a further embodiment of the present invention the at least one coding RNA as described herein may be modified with respect to potentially destabilizing sequence elements. Particularly, the coding region and/or the 5′ and/or 3′ untranslated region of this RNA may be modified compared to the particular wild type RNA such that it contains no destabilizing sequence elements, the coded amino acid sequence of the modified at least one coding RNA preferably not being modified compared to its particular wild type RNA. It is known that, for example, in sequences of eukaryotic RNAs destabilizing sequence elements (DSE) occur, to which signal proteins bind and regulate enzymatic degradation of RNA in vivo. For further stabilization of the modified at least one coding RNA, optionally in the region which encodes for a protein or peptide as defined herein, one or more such modifications compared to the corresponding region of the wild type RNA can therefore be carried out, so that no or substantially no destabilizing sequence elements are contained there. According to the invention, DSE present in the untranslated regions (3′- and/or 5′-UTR) can also be eliminated from the at least one coding RNA described herein by such modifications. Such destabilizing sequences are e.g. AU-rich sequences (AURES), which occur in 3′-UTR sections of numerous unstable RNAs (Caput et al., Proc. Natl. Acad. Sci. USA 1986, 83: 1670 to 1674). The at least one coding RNA as described herein is therefore preferably modified compared to the wild type RNA such that the at least one coding RNA contains no such destabilizing sequences. This also applies to those sequence motifs which are recognized by possible endonucleases, e.g. the sequence GAACAAG, which is contained in the 3′-UTR segment of the gene which codes for the transferrin receptor (Binder et al., EMBO J. 1994, 13: 1969 to 1980). These sequence motifs are also preferably removed in the at least one coding RNA as described herein.

[0491] In a preferred embodiment, the present invention thus provides the isRNA for use in the treatment of a tumor or cancer disease as described herein, wherein the treatment comprises administration of at least one coding RNA (as additional pharmaceutically active ingredient), preferably at least one mRNA, wherein the at least one coding sequence comprises
[0492] a) a nucleic acid sequence selected from the group consisting of SEQ ID NOs: 25-30; 80-85; 91-96; 102-107; 113-118; 601-606; 124-129; 135-140; 612-617; 623-628; 716-725; 727; 1018-1021 and 1059-1062, or a fragment or variant of any of these sequences, preferably from the group consisting of SEQ ID NOs: 32; 87; 98; 109; 120; 131; 142; 608; 619; 630; 632; 636-644; 726 and 1058, or a fragment or variant of any of these sequences;
[0493] b) a nucleic acid sequence selected from the group consisting of SEQ ID NOs: 33; 88; 99; 110; 121; 132; 143; 609; 620; 631; 728-738 and 1025-1028, or a fragment or variant of any of these sequences;
[0494] c) a nucleic acid sequence according to any one of SEQ ID NO: 646, 650-658, 662, 666-674 or 1029-1036, preferably according to any one of SEQ ID NO: 646 or 650-658, or a fragment or variant of any one of these nucleic acid sequences, and a nucleic acid sequence according to any one of SEQ ID NO: 678, 682-690, 694, 698-705, 707 or 1037-1041, preferably according to any one of SEQ ID NO: 678 or 682-690, or a fragment or variant of any of these nucleic acid sequences;
   [0495] or
   [0496] a nucleic acid sequence according to SEQ ID NO: 710 or 713, or a fragment or variant of any of these nucleic acid sequences, and/or
[0497] d) optionally, a nucleic acid sequence selected from the group consisting of SEQ ID NOs: 23; 78; 89; 100; 111; 122; 133; 599; 610; 621 and 1022-1024, or a fragment or variant of any of these sequences, preferably from the group consisting of SEQ ID NOs: 24; 79; 90; 101; 112; 123; 134; 600; 611; 622; 1043 and 1047-1054, or a fragment or variant of any of these sequences.

[0498] Adaptation to Human Codon Usage:

[0499] According to the invention, a further preferred modification of the at least one coding RNA as described herein is based on the finding that codons coding for the same amino acid occur in different frequencies. According to the invention, in the modified at least one coding RNA as described herein, the region which encodes at least one of the above defined peptides or proteins (coding sequence) is preferably modified compared to the corresponding region of the wild type RNA such that the frequency of the codons encoding the same amino acid corresponds to the naturally occurring frequency of that codon present in the human coding usage as e.g. shown in Table 2.

[0500] This means, for example, that for the amino acid alanine (Ala) present in the amino acid sequence of the encoded protein according to the invention, the wild type coding sequence is adapted in a way that the codon “GCC” is used with a frequency of 0.40, the codon “GCT” is used with a frequency of 0.28, the codon “GCA” is used with a frequency of 0.22 and the codon “GCG” is used with a frequency of 0.10 etc. (see Table 2).

TABLE 2
Human codon usage table (most frequent
codon marked with an asterisk)

| Amino acid | codon | fraction | /1000 |
|---|---|---|---|
| Ala | GCG | 0.10 | 7.4 |
| Ala | GCA | 0.22 | 15.8 |
| Ala | GCT | 0.28 | 18.5 |
| Ala | GCC* | 0.40 | 27.7 |
| Cys | TGT | 0.42 | 10.6 |
| Cys | TGC* | 0.58 | 12.6 |
| Asp | GAT | 0.44 | 21.8 |
| Asp | GAC* | 0.56 | 25.1 |
| Glu | GAG* | 0.59 | 39.6 |
| Glu | GAA | 0.41 | 29.0 |
| Phe | TTT | 0.43 | 17.6 |
| Phe | TTC* | 0.57 | 20.3 |
| Gly | GGG | 0.23 | 16.5 |
| Gly | GGA | 0.26 | 16.5 |
| Gly | GGT | 0.18 | 10.8 |
| Gly | GGC* | 0.33 | 22.2 |
| His | CAT | 0.41 | 10.9 |
| His | CAC* | 0.59 | 15.1 |
| Ile | ATA | 0.14 | 7.5 |
| Ile | ATT | 0.35 | 16.0 |
| Ile | ATC* | 0.52 | 20.8 |
| Lys | AAG* | 0.60 | 31.9 |
| Lys | AAA | 0.40 | 24.4 |
| Leu | TTG | 0.12 | 12.9 |
| Leu | TTA | 0.06 | 7.7 |
| Leu | CTG* | 0.43 | 39.6 |
| Leu | CTA | 0.07 | 7.2 |
| Leu | CTT | 0.12 | 13.2 |
| Leu | CTC | 0.20 | 19.6 |
| Met | ATG* | 1 | 22.0 |
| Asn | AAT | 0.44 | 17.0 |
| Asn | AAC* | 0.56 | 19.1 |
| Pro | CCG | 0.11 | 6.9 |
| Pro | CCA | 0.27 | 16.9 |
| Pro | CCT | 0.29 | 17.5 |
| Pro | CCC* | 0.33 | 19.8 |
| Gln | CAG* | 0.73 | 34.2 |
| Gln | CAA | 0.27 | 12.3 |
| Arg | AGG | 0.22 | 12.0 |
| Arg | AGA* | 0.21 | 12.1 |
| Arg | CGG | 0.19 | 11.4 |
| Arg | CGA | 0.10 | 6.2 |
| Arg | CGT | 0.09 | 4.5 |
| Arg | CGC | 0.19 | 10.4 |
| Ser | AGT | 0.14 | 12.1 |
| Ser | AGC* | 0.25 | 19.5 |
| Ser | TCG | 0.06 | 4.4 |
| Ser | TCA | 0.15 | 12.2 |
| Ser | TCT | 0.18 | 15.2 |
| Ser | TCC | 0.23 | 17.7 |
| Thr | ACG | 0.12 | 6.1 |
| Thr | ACA | 0.27 | 15.1 |
| Thr | ACT | 0.23 | 13.1 |
| Thr | ACC* | 0.38 | 18.9 |
| Val | GTG* | 0.48 | 28.1 |
| Val | GTA | 0.10 | 7.1 |
| Val | GTT | 0.17 | 11.0 |
| Val | GTC | 0.25 | 14.5 |
| Trp | TGG* | 1 | 13.2 |
| Tyr | TAT | 0.42 | 12.2 |
| Tyr | TAC* | 0.58 | 15.3 |
| Stop | TGA* | 0.61 | 1.6 |
| Stop | TAG | 0.17 | 0.8 |
| Stop | TAA | 0.22 | 1.0 |

[0501] In a preferred embodiment, the present invention thus provides the isRNA for use in the treatment of a tumor or cancer disease as described herein, wherein the treatment comprises administration of at least one coding RNA (as additional pharmaceutically active ingredient), preferably at least one mRNA, wherein the at least one coding sequence comprises
[0502] a) a nucleic acid sequence selected from the group consisting of SEQ ID NOs: 47-52 and 58-63, or a fragment or variant of any of these sequences, preferably from the group consisting of SEQ ID NOs: 54; 65 and 634, or a fragment or variant of any of these sequences;
[0503] b) a nucleic acid sequence selected from the group consisting of SEQ ID NOs: 55-66, or a fragment or variant of any of these sequences;
[0504] c) a nucleic acid sequence according to any one of SEQ ID NO: 648, 659, 664 or 675, preferably according to SEQ ID NO: 648 or 659, or a fragment or variant of any one of these nucleic acid sequences, and a nucleic acid sequence according to any one of SEQ ID NO: 680, 691, 696 or 708, preferably according to SEQ ID NO: 680 or 691, or a fragment or variant of any of these nucleic acid sequences;
   [0505] or
   [0506] a nucleic acid sequence according to SEQ ID NO: 711 or 714, or a fragment or variant of any of these nucleic acid sequences, and/or
[0507] d) optionally, a nucleic acid sequence selected from the group consisting of SEQ ID NOs: 45 and 56, or a fragment or variant of any of these sequences, preferably from the group consisting of SEQ ID NOs: 46-57 and 1045, or a fragment or variant of any of these sequences.

[0508] Codon-Optimization:

[0509] According to a particularly preferred embodiment it is preferred, that all codons of the wild type sequence of the coding region of the at least one coding RNA as described herein which code for a tRNA which is relatively rare in the cell is in each case exchanged for a codon which codes for a tRNA which is relatively frequent in the cell and which, in each case, carries the same amino acid as the relatively rare tRNA. Therefore it is particularly preferred that the most frequent codons are used for each encoded amino acid (see Table 2, most frequent codons are marked with asterisks).

[0510] This means, for example, that for the amino acid alanine (Ala) present in the amino acid sequence of the encoded peptide or protein according to the invention, the wild type coding sequence is adapted in a way that the most frequent human codon “GCC” is always used for said amino acid, or for the amino acid Cysteine (Cys), the wild type sequence is adapted in a way that the most frequent human codon “TGC” is always used for said amino acid etc.

[0511] In a preferred embodiment, the present invention thus provides the isRNA for use in the treatment of a tumor or cancer disease as described herein, wherein the treatment comprises administration of at least one coding RNA (as additional pharmaceutically active ingredient), preferably at least one mRNA, wherein the at least one coding sequence comprises
[0512] a) a nucleic acid sequence selected from any one of SEQ ID NOs: 69 to 74, or a fragment or variant of any of these sequences, preferably a nucleic acid sequence according to SEQ ID NOs: 76 and 635, or a fragment or variant thereof;
[0513] b) a nucleic acid sequence according to SEQ ID NO: 77, or a fragment or variant thereof;
[0514] c) a nucleic acid sequence according to any one of SEQ ID NO: 649, 660, 665 or 676, preferably according to SEQ ID NO: 649 or 660, or a fragment or variant of any of these nucleic acid sequences, and a nucleic acid sequence according to any one of SEQ ID NO: 681, 692, 697 or 709, preferably according to SEQ ID NO: 681 or 692, or a fragment or variant of any of these nucleic acid sequences;
   [0515] or
   [0516] a nucleic acid sequence according to SEQ ID NO: 712 or 715, or a fragment or variant of any of these nucleic acid sequences, and/or
[0517] d) optionally, a nucleic acid sequence according to SEQ ID NO: 67, or a fragment or variant thereof, more preferably a nucleic acid sequence according to SEQ ID NO: 68 or 1046, or a fragment or variant thereof.

[0518] C-Enrichment:

[0519] According to another embodiment, the at least one coding RNA as described herein may be modified by increasing the C content of the RNA, preferably of the coding region of the at least one coding RNA.

[0520] In a particularly preferred embodiment of the present invention, the C content of the coding region of the at least one coding RNA as described herein is modified, particularly increased, compared to the C content of the coding region of its particular wild type RNA, i.e. the unmodified mRNA. The amino acid sequence encoded by the at least one coding RNA is preferably not modified as compared to the amino acid sequence encoded by the particular wild type RNA.

[0521] In a preferred embodiment of the present invention, the modified RNA is modified such that at least 10%, 20%, 30%, 40%, 50%, 60%, 70% or 80%, or at least 90% of the theoretically maximal cytosine-content or even a maximal cytosine-content is achieved.

[0522] In further preferred embodiments, at least 10%, 20%, 30%, 40%, 50%, 60%, 70%, 80%, 90% or even 100% of the codons of the RNA wild type sequence, which are “cytosine content optimizable” are replaced by codons with a higher cytosine-content as present in the wild type sequence.

[0523] In a further preferred embodiment, some of the codons of the wild type coding sequence may additionally be modified such that a codon for a relatively rare tRNA in the cell is exchanged by a codon for a relatively frequent tRNA in the cell, provided that the substituted codon for a relatively frequent tRNA carries the same amino acid as the relatively rare tRNA of the original wild type codon. Preferably, all of the codons for a relatively rare tRNA are replaced by a codon for a relatively frequent tRNA in the cell, except codons encoding amino acids, which are exclusively encoded by codons not containing any cytosine, or except for glutamine (Gln), which is encoded by two codons each containing the same number of cytosines.

[0524] In a further preferred embodiment of the present invention, the modified RNA is modified such that at least 80%, or at least 90% of the theoretically maximal cytosine-content or even a maximal cytosine-content is achieved by means of codons, which code for relatively frequent tRNAs in the cell, wherein the amino acid sequence remains unchanged.

[0525] Due to the naturally occurring degeneracy of the genetic code, more than one codon may encode a particular amino acid. Accordingly, 18 out of 20 naturally occurring amino acids are encoded by more than 1 codon (with Tryp and Met being an exception), e.g. by 2 codons (e.g. Cys, Asp, Glu), by three codons (e.g. Ile), by 4 codons (e.g. Al, Gly, Pro) or by 6 codons (e.g. Leu, Arg, Ser). However, not all codons encoding the same amino acid are utilized equally frequent under in vivo conditions. Depending on each single organism, a typical codon usage profile is established.

[0526] The term “cytosine content-optimizable codon” as used within the context of the present invention refers to codons, which exhibit a lower amount of cytosines than other codons coding for the same amino acid. Accordingly, any wild type codon, which may be replaced by another codon coding for the same amino acid and exhibiting a higher number of cytosines within that codon, is considered to be cytosine-optimizable (C-optimizable). Any such substitution of a C-optimizable wild type codon by the specific C-optimized codon within a wild type coding region increases its overall C-content and reflects a C-enriched modified RNA sequence. A C-maximized RNA sequence contains C-optimized codons for all potentially C-optimizable codons. Accordingly, 100% or all of the theoretically replaceable C-optimizable codons are under such conditions actually replaced by C-optimized codons over the entire length of the coding region.

[0527] In this context, cytosine-content optimizable codons are codons, which contain a lower number of cytosines than other codons coding for the same amino acid.

[0528] Any of the codons GCG, GCA, GCU codes for the amino acid Ala, which may be exchanged by the codon GCC encoding the same amino acid, and/or

the codon UGU that codes for Cys may be exchanged by the codon UGC encoding the same amino acid, and/or
the codon GAU which codes for Asp may be exchanged by the codon GAC encoding the same amino acid, and/or
the codon that UUU that codes for Phe may be exchanged for the codon UUC encoding the same amino acid, and/or
any of the codons GGG, GGA, GGU that code Gly may be exchanged by the codon GGC encoding the same amino acid, and/or
the codon CAU that codes for His may be exchanged by the codon CAC encoding the same amino acid, and/or
any of the codons AUA, AUU that code for Ile may be exchanged by the codon AUC, and/or
any of the codons UUG, UUA, CUG, CUA, CUU coding for Leu may be exchanged by the codon CUC encoding the same amino acid, and/or
the codon AAU that codes for Asn may be exchanged by the codon AAC encoding the same amino acid, and/or
any of the codons CCG, CCA, CCU coding for Pro may be exchanged by the codon CCC encoding the same amino acid, and/or
any of the codons AGG, AGA, CGG, CGA, CGU coding for Arg may be exchanged by the codon CGC encoding the same amino acid, and/or
any of the codons AGU, AGC, UCG, UCA, UCU coding for Ser may be exchanged by the codon UCC encoding the same amino acid, and/or
any of the codons ACG, ACA, ACU coding for Thr may be exchanged by the codon ACC encoding the same amino acid, and/or
any of the codons GUG, GUA, GUU coding for Val may be exchanged by the codon GUC encoding the same amino acid, and/or
the codon UAU coding for Tyr may be exchanged by the codon UAC encoding the same amino acid.

[0529] In any of the above instances, the number of cytosines is increased by 1 per exchanged codon. Exchange of all non C-optimized codons (corresponding to C-optimizable codons) of the coding region results in a C-maximized coding sequence. In the context of the invention, at least 70% of the non C-optimized codons are replaced by C-optimized codons of the wild type sequence are replaced by C-optimized codons, preferably at least 80%, more preferably at least 90% within the coding region.

[0530] It may be preferred that for some amino acids the percentage of C-optimizable codons replaced by C-optimized codons is less than 70%, while for other amino acids the percentage of replaced codons is higher than 70% to meet the overall percentage of C-optimization of at least 70% of all C-optimizable wild type codons of the coding region.

[0531] Preferably, in the C-optimized RNAs of the invention, at least 50% of the C-optimizable wild type codons for any given amino acid are replaced by C-optimized codons, e.g. any modified C-enriched RNA preferably contains at least 50% C-optimized codons at C-optimizable wild type codon positions coding for any single of the above mentioned amino acids Ala, Cys, Asp, Phe, Gly, His, Ile, Leu, Asn, Pro, Arg, Ser, Thr, Val and Tyr, preferably at least 60%.

[0532] In this context, codons encoding amino acids, which are not cytosine content-optimizable and which are, however, encoded by at least two codons, may be used without any further selection process. However, the codon of the wild type sequence that codes for a relatively rare tRNA in the cell, e.g. a human cell, may be exchanged for a codon that codes for a relatively frequent tRNA in the cell, whereby both code for the same amino acid. Accordingly, the relatively rare codon GAA coding for Glu may be exchanged by the relative frequent codon GAG coding for the same amino acid, and/or

the relatively rare codon AAA coding for Lys may be exchanged by the relative frequent codon AAG coding for the same amino acid, and/or
the relatively rare codon CAA coding for Gin is exchanged for the relative frequent codon CAG encoding the same amino acid.

[0533] In this context, the amino acids Met (AUG) and Trp (UGG), which are encoded by only one codon each, remain unchanged. Stop codons are not cytosine-content optimized, however, the relatively rare stop codons amber, ochre (UAA, UAG) may be exchanged by the relatively frequent stop codon opal (UGA).

[0534] The substitutions listed above may obviously be used individually but also in all possible combinations in order to optimize the cytosine-content of the modified RNA compared to the wild type RNA sequence.

[0535] Accordingly, the region of the modified RNA encoding a peptide or protein may be changed compared to the coding region of the wild type RNA in such a way that an amino acid encoded by at least two or more codons, of which one comprises one additional cytosine, such a codon may be exchanged by the C-optimized codon comprising one additional cytosine, whereby the amino acid is unaltered compared to the wild type sequence.

[0536] In a preferred embodiment, the present invention thus provides the isRNA for use in the treatment of a tumor or cancer disease as described herein, wherein the treatment comprises administration of at least one coding RNA (as additional pharmaceutically active ingredient), preferably at least one mRNA, wherein the at least one coding sequence comprises
[0537] a) a nucleic acid sequence selected from any one of SEQ ID NOs: 36 to 41, or a fragment or variant of any of these sequences, preferably a nucleic acid according to SEQ ID NO: 43 and 633 or a fragment or variant thereof;
[0538] b) a nucleic acid sequence according to SEQ ID NO: 44, or a fragment or variant thereof,
[0539] c) a nucleic acid sequence according to SEQ ID NO: 647 or 663, preferably according to SEQ ID NO: 647, or a fragment or variant of any of these nucleic acid sequences, and a nucleic acid sequence according to SEQ ID NO: 679 or 695, preferably according to SEQ ID NO: 679, or a fragment or variant of any of these nucleic acid sequences, and/or
[0540] d) optionally, a nucleic acid sequence according to SEQ ID NO: 34, or a fragment or variant thereof, preferably a nucleic acid sequence according to SEQ ID NO: 35 and 1044, or a fragment or variant thereof.

[0541] According to a further embodiment, the at least one coding RNA as described herein preferably comprises at least one of the following structural elements: a 5′- and/or 3′-untranslated region element (UTR element), particularly a 5′-UTR element which comprises or consists of a nucleic acid sequence, which is derived from the 5′-UTR of a TOP gene or from a fragment, homolog or a variant thereof, or a 5′- and/or 3′-UTR element which may be derivable from a gene that provides a stable mRNA or from a homolog, fragment or variant thereof; a histone stem-loop structure, preferably a histone stem-loop in its 3′ untranslated region; a 5′-CAP structure; a poly-A tail (poly(A) sequence); or a poly(C) sequence.

[0542] In a preferred embodiment the at least one coding RNA as described herein comprises at least one 5′- or 3′-UTR element. In this context an UTR element comprises or consists of a nucleic acid sequence, which is derived from the 5′- or 3′-UTR of any naturally occurring gene or which is derived from a fragment, a homolog or a variant of the 5′- or 3′-UTR of a gene. Preferably, the 5′- or 3′-UTR element used according to the present invention is heterologous to the coding region of the at least one coding RNA as described herein. Even if 5′- or 3′-UTR elements derived from naturally occurring genes are preferred, also synthetically engineered UTR elements may be used in the context of the present invention.

[0543] In a particularly preferred embodiment, the at least one coding RNA comprises at least one 5′-untranslated region element (5′-UTR element), which comprises or consists of a nucleic acid sequence, which is derived from the 5′-UTR of a TOP gene or which is derived from a fragment, homolog or variant of the 5′-UTR of a TOP gene.

[0544] It is particularly preferred that the 5′-UTR element does not comprise a TOP-motif or a 5′-TOP, as defined above.

[0545] In some embodiments, the nucleic acid sequence of the 5′-UTR element, which is derived from a 5′-UTR of a TOP gene, terminates at its 3′-end with a nucleotide located at position 1, 2, 3, 4, 5, 6, 7, 8, 9 or 10 upstream of the start codon (e.g. A(U/T)G) of the gene or mRNA it is derived from. Thus, the 5′-UTR element does not comprise any part of the protein coding region. Thus, preferably, the only protein coding part of the at least one coding RNA as described herein is provided by the coding region.

[0546] The nucleic acid sequence, which is derived from the 5′-UTR of a TOP gene, is preferably derived from a eukaryotic TOP gene, preferably a plant or animal TOP gene, more preferably a chordate TOP gene, even more preferably a vertebrate TOP gene, most preferably a mammalian TOP gene, such as a human TOP gene.

[0547] For example, the 5′-UTR element is preferably selected from 5′-UTR elements comprising or consisting of a nucleic acid sequence which is derived from a nucleic acid sequence selected from the group consisting of SEQ ID Nos. 1-1363, SEQ ID NO: 1395, SEQ ID NO: 1421 and SEQ ID NO: 1422 of the patent application WO2013/143700, the disclosure of which is incorporated herein by reference, from the homologs of SEQ ID Nos: 1-1363, SEQ ID NO: 1395, SEQ ID NO: 1421 and SEQ ID NO: 1422 of the patent application WO2013/143700, from a variant thereof, or preferably from a corresponding RNA sequence. The term “homologs of SEQ ID Nos: 1-1363, SEQ ID NO: 1395, SEQ ID NO: 1421 and SEQ ID NO: 1422 of the patent application WO2013/143700” refers to sequences of other species than homo sapiens, which are homologous to the sequences according to SEQ ID Nos. 1-1363, SEQ ID NO: 1395, SEQ ID NO: 1421 and SEQ ID NO: 1422 of the patent application WO2013/143700.

[0548] In a preferred embodiment, the 5′-UTR element comprises or consists of a nucleic acid sequence, which is derived from a nucleic acid sequence extending from nucleotide position 5 (i.e. the nucleotide that is located at position 5 in the sequence) to the nucleotide position immediately 5′ to the start codon (located at the 3′ end of the sequences), e.g. the nucleotide position immediately 5′ to the ATG sequence, of a nucleic acid sequence selected from SEQ ID Nos. 1-1363, SEQ ID NO: 1395, SEQ ID NO: 1421 and SEQ ID NO: 1422 of the patent application WO2013/143700, from the homologs of SEQ ID Nos: 1-1363, SEQ ID NO: 1395, SEQ ID NO: 1421 and SEQ ID NO: 1422 of the patent application WO2013/143700 from a variant thereof, or a corresponding RNA sequence. It is particularly preferred that the 5′-UTR element is derived from a nucleic acid sequence extending from the nucleotide position immediately 3′ to the 5′-TOP to the nucleotide position immediately 5′ to the start codon (located at the 3′ end of the sequences), e.g. the nucleotide position immediately 5′ to the ATG sequence, of a nucleic acid sequence selected from SEQ ID Nos: 1-1363, SEQ ID NO: 1395, SEQ ID NO: 1421 and SEQ ID NO: 1422 of the patent application WO2013/143700, from the homologs of SEQ ID Nos. 1-1363, SEQ ID NO: 1395, SEQ ID NO: 1421 and SEQ ID NO: 1422 of the patent application WO2013/143700, from a variant thereof, or a corresponding RNA sequence.

[0549] In some embodiments, the 5′-UTR element may be any 5′-UTR element described in WO2016/107877. In this context, the disclosure of WO2016/107877 relating to 5′-UTR elements/sequences is herewith incorporated by reference. Particularly preferred 5′-UTR elements are nucleic acid sequences according to SEQ ID NOs: 25 to 30 and SEQ ID NOs: 319 to 382 of the patent application WO2016/107877, or fragments or variants of these sequences. In this context, it is particularly preferred that the 5′-UTR element comprises or consists of a corresponding RNA sequence of the nucleic acid sequence according SEQ ID NOs: 25 to 30 and SEQ ID NOs: 319 to 382 of the patent application WO2016/107877.

[0550] In certain embodiments, the 5′-UTR element may be any 5′-UTR element as described in WO2017/036580. In this context, the disclosure of WO2017/036580 relating to 5′-UTR elements/sequences is herewith incorporated by reference. Particularly preferred 5′-UTR elements are nucleic acid sequences according to SEQ ID NOs: 1 to 151 of the patent application WO2017/036580, or fragments or variants of these sequences. In this context, it is particularly preferred that the 5′-UTR element comprises or consists of a corresponding RNA sequence of the nucleic acid sequence according to SEQ ID NOs: 1 to 151 of the patent application WO2017/036580.

[0551] In a particularly preferred embodiment, the 5′-UTR element comprises or consists of a nucleic acid sequence, which is derived from a 5′-UTR of a TOP gene encoding a ribosomal protein or from a variant of a 5′-UTR of a TOP gene encoding a ribosomal protein. For example, the 5′-UTR element comprises or consists of a nucleic acid sequence which is derived from a 5′-UTR of a nucleic acid sequence according to any of SEQ ID NOs: 67, 170, 193, 244, 259, 554, 650, 675, 700, 721, 913, 1016, 1063, 1120, 1138, and 1284-1360 of the patent application WO2013/143700, a corresponding RNA sequence, a homolog thereof, or a variant thereof as described herein, preferably lacking the 5′-TOP motif. As described above, the sequence extending from position 5 to the nucleotide immediately 5′ to the ATG (which is located at the 3′end of the sequences) corresponds to the 5′-UTR of said sequences.

[0552] Preferably, the 5′-UTR element comprises or consists of a nucleic acid sequence, which is derived from a 5′-UTR of a TOP gene encoding a ribosomal large protein (RPL) or from a homolog or variant of a 5′-UTR of a TOP gene encoding a ribosomal large protein (RPL). For example, the 5′-UTR element comprises or consists of a nucleic acid sequence which is derived from a 5′-UTR of a nucleic acid sequence according to any of SEQ ID NOs: 67, 259, 1284-1318, 1344, 1346, 1348-1354, 1357, 1358, 1421 and 1422 of the patent application WO2013/143700, a corresponding RNA sequence, a homolog thereof, or a variant thereof as described herein, preferably lacking the 5′-TOP motif.

[0553] In a particularly preferred embodiment, the 5′-UTR element comprises or consists of a nucleic acid sequence which is derived from the 5′-UTR of a ribosomal protein Large 32 gene, preferably from a vertebrate ribosomal protein Large 32 (L32) gene, more preferably from a mammalian ribosomal protein Large 32 (L32) gene, most preferably from a human ribosomal protein Large 32 (L32) gene, or from a variant of the 5′-UTR of a ribosomal protein Large 32 gene, preferably from a vertebrate ribosomal protein Large 32 (L32) gene, more preferably from a mammalian ribosomal protein Large 32 (L32) gene, most preferably from a human ribosomal protein Large 32 (L32) gene, wherein preferably the 5′-UTR element does not comprise the 5′-TOP of said gene.

[0554] A preferred sequence for a 5′-UTR element corresponds to SEQ ID NO: 1368 of the patent application WO2013/143700.

[0555] Accordingly, in a particularly preferred embodiment, the 5′-UTR element comprises or consists of a nucleic acid sequence, which has an identity of at least about 20%, preferably of at least about 40%, preferably of at least about 50%, preferably of at least about 60%, preferably of at least about 70%, more preferably of at least about 80%, more preferably of at least about 90%, even more preferably of at least about 95%, even more preferably of at least about 99% to the nucleic acid sequence as mentioned above (according to SEQ ID NO: 408 (5′-UTR of human ribosomal protein Large 32 lacking the 5′ terminal oligopyrimidine tract:

### GGCGCTGCCTACGGAGGTGGCAGCCATCTCCTTCTCGGCATC;

[0556] corresponding to SEQ ID NO: 1368 of the patent application WO2013/143700)) or preferably to a corresponding RNA sequence, or wherein the at least one 5′UTR element comprises or consists of a fragment of a nucleic acid sequence which has an identity of at least about 40%, preferably of at least about 50%, preferably of at least about 60%, preferably of at least about 70%, more preferably of at least about 80%, more preferably of at least about 90%, even more preferably of at least about 95%, even more preferably of at least about 99% to the nucleic acid sequence according to SEQ ID NO: 409 or more preferably to a corresponding RNA sequence, wherein, preferably, the fragment is as described above, i.e. being a continuous stretch of nucleotides representing at least 20% etc. of the full-length 5′-UTR.

[0557] Preferably, the fragment exhibits a length of at least about 20 nucleotides or more, preferably of at least about 30 nucleotides or more, more preferably of at least about 40 nucleotides or more. Preferably, the fragment is a functional fragment as described herein.

[0558] In some embodiments, the at least one coding RNA as described herein comprises a 5′-UTR element, which comprises or consists of a nucleic acid sequence, which is derived from the 5′-UTR of a vertebrate TOP gene, such as a mammalian, e.g. a human TOP gene, selected from RPSA, RPS2, RPS3, RPS3A, RPS4, RPS5, RPS6, RPS7, RPS8, RPS9, RPS10, RPS11, RPS12, RPS13, RPS14, RPS15, RPS15A, RPS16, RPS17, RPS18, RPS19, RPS20, RPS21, RPS23, RPS24, RPS25, RPS26, RPS27, RPS27A, RPS28, RPS29, RPS30, RPL3, RPL4, RPL5, RPL6, RPL7, RPL7A, RPL8, RPL9, RPL10, RPL10A, RPL11, RPL12, RPL13, RPL13A, RPL14, RPL15, RPL17, RPL18, RPL18A, RPL19, RPL21, RPL22, RPL23, RPL23A, RPL24, RPL26, RPL27, RPL27A, RPL28, RPL29, RPL30, RPL31, RPL32, RPL34, RPL35, RPL35A, RPL36, RPL36A, RPL37, RPL37A, RPL38, RPL39, RPL40, RPL41, RPLP0, RPLP1, RPLP2, RPLP3, RPLP0, RPLP1, RPLP2, EEF1A1, EEF1B2, EEF1D, EEF1G, EEF2, EIF3E, EIF3F, EIF3H, EIF2S3, EIF3C, EIF3K, EIF3EIP, EIF4A2, PABPC1, HNRNPA1, TPT1, TUBB1, UBA52, NPM1, ATP5G2, GNB2L1, NME2, UQCRB, or from a homolog or variant thereof, wherein preferably the 5′-UTR element does not comprise a TOP-motif or the 5′-TOP of said genes, and wherein optionally the 5′-UTR element starts at its 5′-end with a nucleotide located at position 1, 2, 3, 4, 5, 6, 7, 8, 9 or 10 downstream of the 5′ terminal oligopyrimidine tract (TOP) and wherein further optionally the 5′-UTR element which is derived from a 5′-UTR of a TOP gene terminates at its 3′-end with a nucleotide located at position 1, 2, 3, 4, 5, 6, 7, 8, 9 or 10 upstream of the start codon (A(U/T)G) of the gene it is derived from.

[0559] In certain embodiments, the at least one coding RNA as described herein comprises a 5′-UTR element, which comprises or consists of a nucleic acid sequence, which is derived from the 5′-UTR of a gene selected from the group consisting of Mp68 (6.8 kDa mitochondrial proteolipid), Nosip (Nitric oxide synthase-interacting protein), HSD17B4 (hydroxysteroid (17-beta) dehydrogenase 4), Rpl31 (60S ribosomal protein L31), TUBB4B (Tubulin beta-4B chain), ATP5A1 (ATP synthase subunit alpha (mitochondrial)) and Ndufa4.1 (Cytochrome c oxidase subunit NDUFA4), or from a variant of any of these genes, wherein the gene or the variant thereof is preferably a vertebrate gene, more preferably a mammalian gene, and even more preferably a human gene.

[0560] According to a further preferred embodiment, the at least one coding RNA as described herein comprises a 5′-UTR element, which comprises or consists of a nucleic acid sequence, which is derived from the 5′-UTR of a gene selected from the group consisting of Mp68 (6.8 kDa mitochondrial proteolipid), Nosip (Nitric oxide synthase-interacting protein), HSD17B4 (hydroxysteroid (17-beta) dehydrogenase 4), Rpl31 (60S ribosomal protein L31), TUBB4B (Tubulin beta-4B chain), ATP5A1 (ATP synthase subunit alpha (mitochondrial)), Ndufa4.1 (Cytochrome c oxidase subunit NDUFA4), ribosomal protein Large 32 gene (RPL32), a ribosomal protein Large 35 gene (RPL35), a ribosomal protein Large 21 gene (RPL21), an ATP synthase, H+ transporting, mitochondrial F1 complex, alpha subunit 1, cardiac muscle (ATP5A1) gene, an androgen-induced 1 gene (AIG1), cytochrome c oxidase subunit VIc gene (COX6C) and a N-acylsphingosine amidohydrolase (acid ceramidase) 1 gene (ASAH1), or from a variant of any of these genes, wherein the gene or the variant thereof is preferably a vertebrate gene, more preferably a mammalian gene, and even more preferably a human gene.

[0561] In further particularly preferred embodiments, the 5′-UTR element comprises or consists of a nucleic acid sequence, which is derived from the 5′-UTR of a ribosomal protein Large 32 gene (RPL32), a ribosomal protein Large 35 gene (RPL35), a ribosomal protein Large 21 gene (RPL21), an ATP synthase, H+ transporting, mitochondrial F1 complex, alpha subunit 1, cardiac muscle (ATP5A1) gene, an hydroxysteroid (17-beta) dehydrogenase 4 gene (HSD17B4), an androgen-induced 1 gene (AIG1), cytochrome c oxidase subunit VIc gene (COX6C), or a N-acylsphingosine amidohydrolase (acid ceramidase) 1 gene (ASAH1) or from a variant thereof, preferably from a vertebrate ribosomal protein Large 32 gene (RPL32), a vertebrate ribosomal protein Large 35 gene (RPL35), a vertebrate ribosomal protein Large 21 gene (RPL21), a vertebrate ATP synthase, H+ transporting, mitochondrial F1 complex, alpha subunit 1, cardiac muscle (ATP5A1) gene, a vertebrate hydroxysteroid (17-beta) dehydrogenase 4 gene (HSD17B4), a vertebrate androgen-induced 1 gene (AIG1), a vertebrate cytochrome c oxidase subunit VIc gene (COX6C), or a vertebrate N-acylsphingosine amidohydrolase (acid ceramidase) 1 gene (ASAH1) or from a variant thereof, more preferably from a mammalian ribosomal protein Large 32 gene (RPL32), a ribosomal protein Large 35 gene (RPL35), a ribosomal protein Large 21 gene (RPL21), a mammalian ATP synthase, H+ transporting, mitochondrial F1 complex, alpha subunit 1, cardiac muscle (ATP5A1) gene, a mammalian hydroxysteroid (17-beta) dehydrogenase 4 gene (HSD17B4), a mammalian androgen-induced 1 gene (AIG1), a mammalian cytochrome c oxidase subunit VIc gene (COX6C), or a mammalian N-acylsphingosine amidohydrolase (acid ceramidase) 1 gene (ASAH1) or from a variant thereof, most preferably from a human ribosomal protein Large 32 gene (RPL32), a human ribosomal protein Large 35 gene (RPL35), a human ribosomal protein Large 21 gene (RPL21), a human ATP synthase, H+ transporting, mitochondrial F1 complex, alpha subunit 1, cardiac muscle (ATP5A1) gene, a human hydroxysteroid (17-beta) dehydrogenase 4 gene (HSD17B4), a human androgen-induced 1 gene (AIG1), a human cytochrome c oxidase subunit VIc gene (COX6C), or a human N-acylsphingosine amidohydrolase (acid ceramidase) 1 gene (ASAH1) or from a variant thereof, wherein preferably the 5′-UTR element does not comprise the 5′-TOP of said gene.

[0562] Accordingly, in a particularly preferred embodiment, the 5′-UTR element comprises or consists of a nucleic acid sequence, which has an identity of at least about 40%, preferably of at least about 50%, preferably of at least about 60%, preferably of at least about 70%, more preferably of at least about 80%, more preferably of at least about 90%, even more preferably of at least about 95%, even more preferably of at least about 99% to the nucleic acid sequence according to SEQ ID NO: 1368, or SEQ ID NOs: 1412-1420 of the patent application WO2013/143700, or a corresponding RNA sequence, or wherein the at least one 5′-UTR element comprises or consists of a fragment of a nucleic acid sequence which has an identity of at least about 20%, preferably of at least about 40%, preferably of at least about 50%, preferably of at least about 60%, preferably of at least about 70%, more preferably of at least about 80%, more preferably of at least about 90%, even more preferably of at least about 95%, even more preferably of at least about 99% to the nucleic acid sequence according to SEQ ID NO: 1368, or SEQ ID NOs: 1412-1420 of the patent application WO2013/143700, wherein, preferably, the fragment is as described above, i.e. being a continuous stretch of nucleotides representing at least 20% etc. of the full-length 5′-UTR. Preferably, the fragment exhibits a length of at least about 20 nucleotides or more, preferably of at least about 30 nucleotides or more, more preferably of at least about 40 nucleotides or more. Preferably, the fragment is a functional fragment as described herein.

[0563] According to a particularly preferred embodiment, the 5′-UTR element comprises or consists of a nucleic acid sequence, which has an identity of at least about 40%, preferably of at least about 50%, preferably of at least about 60%, preferably of at least about 70%, more preferably of at least about 80%, more preferably of at least about 90%, even more preferably of at least about 95%, even more preferably of at least about 99% to the nucleic acid sequence according to any one of SEQ ID NO: 838, 840, 842, 844, 846, 848, 850, or 1004-1013, or a corresponding RNA sequence, or wherein the at least one 5′-UTR element comprises or consists of a fragment of a nucleic acid sequence which has an identity of at least about 20%, preferably of at least about 40%, preferably of at least about 50%, preferably of at least about 60%, preferably of at least about 70%, more preferably of at least about 80%, more preferably of at least about 90%, even more preferably of at least about 95%, even more preferably of at least about 99% to the nucleic acid sequence according to any one of SEQ ID NO: 838, 840, 842, 844, 846, 848, 850, or 1004-1013, wherein, preferably, the fragment is as described above, i.e. being a continuous stretch of nucleotides representing at least 20% etc. of the full-length 5′-UTR. Preferably, the fragment exhibits a length of at least about 20 nucleotides or more, preferably of at least about 30 nucleotides or more, more preferably of at least about 40 nucleotides or more. Preferably, the fragment is a functional fragment as described herein.

[0564] In a further preferred embodiment, the 5′-UTR element comprises or consists of a nucleic acid sequence, which has an identity of at least about 40%, preferably of at least about 50%, preferably of at least about 60%, preferably of at least about 70%, more preferably of at least about 80%, more preferably of at least about 90%, even more preferably of at least about 95%, even more preferably of at least about 99% to the nucleic acid sequence according to any one of SEQ ID NO: 838, 840, 842, 844, 846, 848 or 850, or a corresponding RNA sequence, preferably selected from SEQ ID NO: 839, 841, 843, 845, 847, 849 and 851, or wherein the at least one 5′-UTR element comprises or consists of a fragment of a nucleic acid sequence which has an identity of at least about 20%, preferably of at least about 40%, preferably of at least about 50%, preferably of at least about 60%, preferably of at least about 70%, more preferably of at least about 80%, more preferably of at least about 90%, even more preferably of at least about 95%, even more preferably of at least about 99% to the nucleic acid sequence according to any one of SEQ ID NO: 838, 840, 842, 844, 846, 848 or 850, wherein, preferably, the fragment is as described above, i.e. being a continuous stretch of nucleotides representing at least 20% etc. of the full-length 5′-UTR. Preferably, the fragment exhibits a length of at least about 20 nucleotides or more, preferably of at least about 30 nucleotides or more, more preferably of at least about 40 nucleotides or more. Preferably, the fragment is a functional fragment as described herein.

[0565] Accordingly, in a particularly preferred embodiment, the 5′-UTR element comprises or consists of a nucleic acid sequence, which has an identity of at least about 20%, preferably of at least about 40%, preferably of at least about 50%, preferably of at least about 60%, preferably of at least about 70%, more preferably of at least about 80%, more preferably of at least about 90%, even more preferably of at least about 95%, even more preferably of at least about 99% to the nucleic acid sequence according to SEQ ID NO: 410 (5′-UTR of ATP5A1 lacking the 5′ terminal oligopyrimidine tract:

### GCGGCTCGGCCATTTTGTCCCAGTCAGCCTATATCGGAGGCTGCGGCTGCAGAAGTACCGCCTGCGGAGTAACTGCAAAG;

[0566] corresponding to SEQ ID NO: 1414 of the patent application WO2013/143700 (5′-UTR of ATP5A1 lacking the 5′ terminal oligopyrimidine tract) or preferably to a corresponding RNA sequence (SEQ ID NO: 411), or wherein the at least one 5′UTR element comprises or consists of a fragment of a nucleic acid sequence which has an identity of at least about 40%, preferably of at least about 50%, preferably of at least about 60%, preferably of at least about 70%, more preferably of at least about 80%, more preferably of at least about 90%, even more preferably of at least about 95%, even more preferably of at least about 99% to the nucleic acid sequence according to SEQ ID NO: 26 (of the patent application WO2013/143700) or more preferably to a corresponding RNA sequence, wherein, preferably, the fragment is as described above, i.e. being a continuous stretch of nucleotides representing at least 20% etc. of the full-length 5′-UTR. Preferably, the fragment exhibits a length of at least about 20 nucleotides or more, preferably of at least about 30 nucleotides or more, more preferably of at least about 40 nucleotides or more. Preferably, the fragment is a functional fragment as described herein.

[0567] In a further preferred embodiment, the at least one coding RNA as described herein further comprises at least one 3′-UTR element, which comprises or consists of a nucleic acid sequence derived from the 3′-UTR of a chordate gene, preferably a vertebrate gene, more preferably a mammalian gene, most preferably a human gene, or from a variant of the 3′-UTR of a chordate gene, preferably a vertebrate gene, more preferably a mammalian gene, most preferably a human gene.

[0568] The term ‘3′-UTR element’ refers to a nucleic acid sequence, which comprises or consists of a nucleic acid sequence that is derived from a 3′-UTR or from a variant of a 3′-UTR. A 3′-UTR element in the sense of the present invention may represent the 3′-UTR of an mRNA. Thus, in the sense of the present invention, preferably, a 3′-UTR element may be the 3′-UTR of an mRNA, preferably of an artificial mRNA, or it may be the transcription template for a 3′-UTR of an mRNA. Thus, a 3′-UTR element preferably is a nucleic acid sequence, which corresponds to the 3′-UTR of an mRNA, preferably to the 3′-UTR of an artificial mRNA, such as an mRNA obtained by transcription of a genetically engineered vector construct. Preferably, the 3′-UTR element fulfils the function of a 3′-UTR or encodes a sequence, which fulfils the function of a 3′-UTR.

[0569] Preferably, the inventive mRNA comprises a 3′-UTR element which may be derivable from a gene that relates to an mRNA with an enhanced half-life (that provides a stable mRNA), for example a 3′-UTR element as defined and described below. Preferably, the 3′ UTR element, is a nucleic acid sequence derived from a 3′ UTR of a gene, which preferably encodes a stable mRNA, or from a homolog, a fragment or a variant of said gene

[0570] In a particularly preferred embodiment, the 3′-UTR element comprises or consists of a nucleic acid sequence which is derived from a 3′-UTR of a gene selected from the group consisting of an albumin gene, an α-globin gene, a β-globin gene, a tyrosine hydroxylase gene, a lipoxygenase gene, and a collagen alpha gene, such as a collagen alpha 1(I) gene, or from a variant of a 3′-UTR of a gene selected from the group consisting of an albumin gene, an α-globin gene, a β-globin gene, a tyrosine hydroxylase gene, a lipoxygenase gene, and a collagen alpha gene, such as a collagen alpha 1(I) gene according to SEQ ID NO: 1369-1390 of the patent application WO2013/143700 whose disclosure is incorporated herein by reference. In a particularly preferred embodiment, the 3′-UTR element comprises or consists of a nucleic acid sequence, which is derived from a 3′-UTR of an albumin gene, preferably a vertebrate albumin gene, more preferably a mammalian albumin gene, most preferably a human albumin gene, most preferably a human albumin gene according to SEQ ID NO: 420 (according SEQ ID No: 1369 of the patent application WO2013/143700). The mRNA sequence may comprise or consist of a nucleic acid sequence which is derived from the 3′-UTR of the human albumin gene according to GenBank Accession number NM_000477.5, or from a fragment or variant thereof.

[0571] In this context it is particularly preferred that the at least one coding RNA as described herein comprises a 3′-UTR element comprising a corresponding RNA sequence derived from the nucleic acids according to SEQ ID NO: 1369-1390 of the patent application WO2013/143700 or a fragment, homolog or variant thereof.

[0572] Most preferably, the 3′-UTR element comprises the nucleic acid sequence derived from a fragment of the human albumin gene (albumin7 3′UTR) according to SEQ ID NO: 422 or 424 (according to SEQ ID No: 1376 of the patent application WO2013/143700).

[0573] In this context it is particularly preferred that the 3′-UTR element of the at least one RNA of the inventive composition comprises or consists of a corresponding RNA sequence of the nucleic acid sequence according to SEQ ID NO: 423 or 425.

[0574] In another particularly preferred embodiment, the 3′-UTR element comprises or consists of a nucleic acid sequence which is derived from a 3′-UTR of an α-globin gene, preferably a vertebrate α- or β-globin gene, more preferably a mammalian α- or β-globin gene, most preferably a human α- or β-globin gene according to SEQ ID NO: 412 (corresponding to SEQ ID NO: 1370 of the patent application WO2013/143700 (3′-UTR of Homo sapiens hemoglobin, alpha 1 (HBA1))), or according to SEQ ID NO: 414 (corresponding to SEQ ID NO: 1371 of the patent application WO2013/143700 (3′-UTR of Homo sapiens hemoglobin, alpha 2 (HBA2))), and/or according to SEQ ID NO: 416 (corresponding to SEQ ID NO: 1372 of the patent application WO2013/143700 (3′-UTR of Homo sapiens hemoglobin, beta (HBB)).

[0575] For example, the 3′-UTR element may comprise or consist of the center, α-complex-binding portion of the 3′-UTR of an α-globin gene, according to SEQ ID NO: 418 (corresponding to SEQ ID NO: 1393 of the patent application WO2013/143700).

[0576] In this context it is particularly preferred that the 3′-UTR element of the RNA of the inventive composition comprises or consists of a corresponding RNA sequence of the nucleic acid sequence according to SEQ ID NO: 419, according to the above or a homolog, a fragment or variant thereof.

[0577] The term ‘a nucleic acid sequence which is derived from the 3′-UTR of a [ . . . ] gene’ preferably refers to a nucleic acid sequence which is based on the 3′-UTR sequence of a [ . . . ] gene or on a part thereof, such as on the 3′-UTR of an albumin gene, an α-globin gene, a β-globin gene, a tyrosine hydroxylase gene, a lipoxygenase gene, or a collagen alpha gene, such as a collagen alpha 1(I) gene, preferably of an albumin gene or on a part thereof. This term includes sequences corresponding to the entire 3′-UTR sequence, i.e. the full length 3′-UTR sequence of a gene, and sequences corresponding to a fragment of the 3′-UTR sequence of a gene, such as an albumin gene, α-globin gene, β-globin gene, tyrosine hydroxylase gene, lipoxygenase gene, or collagen alpha gene, such as a collagen alpha 1(I) gene, preferably of an albumin gene.

[0578] The term ‘a nucleic acid sequence which is derived from a variant of the 3′-UTR of a [ . . . ] gene’ preferably refers to a nucleic acid sequence which is based on a variant of the 3′-UTR sequence of a gene, such as on a variant of the 3′-UTR of an albumin gene, an α-globin gene, a β-globin gene, a tyrosine hydroxylase gene, a lipoxygenase gene, or a collagen alpha gene, such as a collagen alpha 1(I) gene, or on a part thereof as described above. This term includes sequences corresponding to the entire sequence of the variant of the 3′-UTR of a gene, i.e. the full length variant 3′-UTR sequence of a gene, and sequences corresponding to a fragment of the variant 3′-UTR sequence of a gene. A fragment in this context preferably consists of a continuous stretch of nucleotides corresponding to a continuous stretch of nucleotides in the full-length variant 3′-UTR, which represents at least 20%, preferably at least 30%, more preferably at least 40%, more preferably at least 50%, even more preferably at least 60%, even more preferably at least 70%, even more preferably at least 80%, and most preferably at least 90% of the full-length variant 3′-UTR. Such a fragment of a variant, in the sense of the present invention, is preferably a functional fragment of a variant as described herein.

[0579] In some embodiments, the 3′-UTR element may be any 3′-UTR element described in WO2016/107877. In this context, the disclosure of WO2016/107877 relating to 3′-UTR elements/sequences is herewith incorporated by reference. Particularly preferred 3′-UTR elements are SEQ ID NOs: 1 to 24 and SEQ ID NOs: 49 to 318 of the patent application WO2016/107877, or fragments or variants of these sequences. In this context, it is particularly preferred that the 3′-UTR element comprises or consists of a corresponding RNA sequence of the nucleic acid sequence according SEQ ID NOs: 1 to 24 and SEQ ID NOs: 49 to 318 of the patent application WO2016/107877.

[0580] In certain embodiments, the 3′-UTR element may be any 3′-UTR element as described in WO2017/036580. In this context, the disclosure of WO2017/036580 relating to 3′-UTR elements/sequences is herewith incorporated by reference. Particularly preferred 3′-UTR elements are nucleic acid sequences according to SEQ ID NOs: 152 to 204 of the patent application WO2017/036580, or fragments or variants of these sequences. In this context, it is particularly preferred that the 3′-UTR element comprises or consists of a corresponding RNA sequence of the nucleic acid sequence according SEQ ID NOs: 152 to 204 of the patent application WO2017/036580.

[0581] According to one embodiment, the at least one coding RNA as described herein further comprises at least one 3′-UTR element, which comprises or consists of a nucleic acid sequence derived from the 3′-UTR of a gene selected from the group consisting of 40S ribosomal protein S9 (RPS9), Proteasome Subunit Beta 3 (PSMB3), Caspase 1 (CASP1), and Cytochrome c oxidase subunit 6B1 (COX6B1), or a variant of any of these genes, wherein the gene or the variant thereof is preferably a vertebrate gene, more preferably a mammalian gene, and even more preferably a human gene.

[0582] In a particularly preferred embodiment, the 3′-UTR element comprises or consists of a nucleic acid sequence which is derived from a 3′-UTR of a gene selected from the group consisting of an albumin gene, an α-globin gene, a β-globin gene, a tyrosine hydroxylase gene, a lipoxygenase gene, and a collagen alpha gene, such as a collagen alpha 1(I) gene, preferably as described herein, a 40S ribosomal protein S9 gene (RPS9), a Proteasome Subunit Beta 3 gene (PSMB3), a Caspase 1 gene (CASP1), and a Cytochrome c oxidase subunit 6B1 gene (COX6B1), or a variant of any of these genes, wherein the gene or the variant thereof is preferably a vertebrate gene, more preferably a mammalian gene, and even more preferably a human gene.

[0583] In a further preferred embodiment, the 3′-UTR element comprises or consists of a nucleic acid sequence, which has an identity of at least about 40%, preferably of at least about 50%, preferably of at least about 60%, preferably of at least about 70%, more preferably of at least about 80%, more preferably of at least about 90%, even more preferably of at least about 95%, even more preferably of at least about 99% to the nucleic acid sequence according to any one of SEQ ID NO: 852, 854, 856 or 858, or a corresponding RNA sequence, preferably selected from SEQ ID NO: 853, 855, 857 or 859, or wherein the at least one 3′-UTR element comprises or consists of a fragment of a nucleic acid sequence which has an identity of at least about 20%, preferably of at least about 40%, preferably of at least about 50%, preferably of at least about 60%, preferably of at least about 70%, more preferably of at least about 80%, more preferably of at least about 90%, even more preferably of at least about 95%, even more preferably of at least about 99% to the nucleic acid sequence according to any one of SEQ ID NO: 852, 854, 856 or 858, wherein, preferably, the fragment is as described above, i.e. being a continuous stretch of nucleotides representing at least 20% etc. of the full-length 3′-UTR. Preferably, the fragment exhibits a length of at least about 20 nucleotides or more, preferably of at least about 30 nucleotides or more, more preferably of at least about 40 nucleotides or more. Preferably, the fragment is a functional fragment as described herein.

[0584] According to a particularly preferred embodiment, the 3′-UTR element comprises or consists of a nucleic acid sequence, which has an identity of at least about 40%, preferably of at least about 50%, preferably of at least about 60%, preferably of at least about 70%, more preferably of at least about 80%, more preferably of at least about 90%, even more preferably of at least about 95%, even more preferably of at least about 99% to the nucleic acid sequence according to any one of SEQ ID NO: 852, 854, 856, 858, 412, 414, 416, 418, 420, 422 or 424, or a corresponding RNA sequence, or wherein the at least one 3′-UTR element comprises or consists of a fragment of a nucleic acid sequence which has an identity of at least about 20%, preferably of at least about 40%, preferably of at least about 50%, preferably of at least about 60%, preferably of at least about 70%, more preferably of at least about 80%, more preferably of at least about 90%, even more preferably of at least about 95%, even more preferably of at least about 99% to the nucleic acid sequence according to any one of SEQ ID NO: 852, 854, 856, 858, 412, 414, 416, 418, 420, 422 or 424, or, wherein, preferably, the fragment is as described above, i.e. being a continuous stretch of nucleotides representing at least 20% etc. of the full-length 3′-UTR. Preferably, the fragment exhibits a length of at least about 20 nucleotides or more, preferably of at least about 30 nucleotides or more, more preferably of at least about 40 nucleotides or more. Preferably, the fragment is a functional fragment as described herein.

[0585] Preferably, the at least one 5′-UTR element and the at least-one 3′-UTR element act synergistically to increase protein production from the at least one coding RNA as described herein.

[0586] In a preferred embodiment, the at least one coding RNA as described herein thus comprises at least one 5′-UTR element, preferably as described herein, and at least one 3′-UTR element, preferably as described herein. Particularly preferred 5′-UTR elements, 3′-UTR elements and the respective combinations thereof are summarized in the following Table A. Therein, the 5′-UTR elements and the 3′-UTR elements are preferably as described herein.

TABLE A
Preferred combinations of 5′-UTR elements and 3′-UTR elements:

| 5′-UTR | SEQ ID | SEQ ID | 3′-UTR | SEQ ID NO: | SEQ ID |
|---|---|---|---|---|---|
| element: | NO: RNA | NO: DNA | element: | RNA | NO: DNA |
| Mp68 | 839 | 838 | RPS9 | 853 | 852 |
| Nosip | 841 | 840 | RPS9 | 853 | 852 |
| HSD17B4 | 843 | 842 | PSMB3 | 855 | 854 |
| Rpl31 | 845 | 844 | CASP1 | 857 | 856 |
| TUBB4B | 847 | 846 | RPS9 | 853 | 852 |
| ATP5A1 | 849 | 848 | PSMB3 | 855 | 854 |
| Ndufa4 | 851 | 850 | RPS9 | 853 | 852 |
| Mp68 | 839 | 838 | COX6B | 859 | 858 |
| Rpl31 | 845 | 844 | PSMB3 | 855 | 854 |
| HSD17B4 | 843 | 842 | COX6B | 859 | 858 |

[0587] According to preferred embodiments, a 5′-UTR element as indicated in column 1 (‘5′-UTR element’) of Table A and as described herein is combined in the at least one coding RNA as used herein with the 3′-UTR element indicated in the same row in column 4 (‘3-UTR element’) of Table A and as described herein. For example, a 5′-UTR element derived from an Mp68 gene or a variant thereof as described herein may preferably be combined with a 3′-UTR element derived from an RPS9 gene or a variant thereof as described herein. More preferably, a 5′-UTR element comprising an RNA sequence according to the SEQ ID NO: indicated in column 2 (‘SEQ ID NO: RNA’) of Table A or a DNA sequence according to the SEQ ID NO: indicated in column 3 (‘SEQ ID NO: DNA’) of Table A, or a fragment or variant of said RNA or DNA sequence, may be combined with the 3′-UTR element in the same row of Table A, i.e. preferably the 3′-UTR element comprising an RNA sequence according to the SEQ ID NO: indicated in column 5 (‘SEQ ID NO: RNA’) in the same row of Table A or a DNA sequence according to the SEQ ID NO: indicated in column 6 (‘SEQ ID NO: DNA’) in the same row of Table A, or a fragment or variant of said RNA or DNA sequence. For example, the at least one coding RNA as used herein may comprise a 5′-UTR element comprising or consisting of the nucleic acid sequence defined by SEQ ID NO: 841, or a fragment or variant thereof as defined herein, and a 3′-UTR element comprising or consisting of the nucleic acid sequence defined by SEQ ID NO: 853, or a fragment or variant thereof as defined herein.

[0588] According to another preferred embodiment of the invention, an isRNA or the at least one coding RNA as described herein, can be modified by the addition of a so-called “5′ cap” structure, which preferably stabilizes the RNA as described herein. A 5′-cap is an entity, typically a modified nucleotide entity, which generally “caps” the 5′-end of a mature mRNA. A 5′-cap may typically be formed by a modified nucleotide, particularly by a derivative of a guanine nucleotide. Preferably, the 5′-cap is linked to the 5′-terminus via a 5′-5′-triphosphate linkage. A 5′-cap may be methylated, e.g. m7GpppN, wherein N is the terminal 5′ nucleotide of the nucleic acid carrying the 5′-cap, typically the 5′-end of an mRNA. m7GpppN is the 5′-cap structure, which naturally occurs in mRNA transcribed by polymerase II and is therefore preferably not considered as modification comprised in a modified RNA in this context. Accordingly, a modified RNA of the present invention may comprise a m7GpppN as 5′-cap, but additionally the modified RNA typically comprises at least one further modification as defined herein.

[0589] Further examples of 5′cap structures include glyceryl, inverted deoxy abasic residue (moiety), 4′,5′ methylene nucleotide, 1-(beta-D-erythrofuranosyl) nucleotide, 4′-thio nucleotide, carbocyclic nucleotide, 1,5-anhydrohexitol nucleotide, L-nucleotides, alpha-nucleotide, modified base nucleotide, threo-pentofuranosyl nucleotide, acyclic 3′,4′-seco nucleotide, acyclic 3,4-dihydroxybutyl nucleotide, acyclic 3,5 dihydroxypentyl nucleotide, 3′-3′-inverted nucleotide moiety, 3′-3′-inverted abasic moiety, 3′-2′-inverted nucleotide moiety, 3′-2′-inverted abasic moiety, 1,4-butanediol phosphate, 3′-phosphoramidate, hexylphosphate, aminohexyl phosphate, 3′-phosphate, 3′phosphorothioate, phosphorodithioate, or bridging or non-bridging methylphosphonate moiety. These modified 5′-cap structures are regarded as at least one modification in this context.

[0590] Particularly preferred modified 5′-cap structures are cap1 (methylation of the ribose of the adjacent nucleotide of m7G), cap2 (additional methylation of the ribose of the 2nd nucleotide downstream of the m7G), cap3 (additional methylation of the ribose of the 3rd nucleotide downstream of the m7G), cap4 (methylation of the ribose of the 4th nucleotide downstream of the m7G), ARCA (anti-reverse cap analogue, modified ARCA (e.g. phosphothioate modified ARCA), inosine, N1-methyl-guanosine, 2′-fluoro-guanosine, 7-deaza-guanosine, 8-oxo-guanosine, 2-amino-guanosine, LNA-guanosine, and 2-azido-guanosine.

[0591] In some embodiments, the at least one coding RNA as described herein preferably comprises a poly(A) and/or a poly(C) sequence.

[0592] In a particularly preferred embodiment, the at least one coding RNA as described herein comprises additionally to the coding region encoding at least one peptide or protein as described above or a fragment or variant thereof, a poly(A) sequence, also called poly-A tail, preferably at the 3′ terminus of the RNA. If present, such a poly(A) sequence comprises a sequence of about 25 to about 400 adenosine nucleotides, preferably a sequence of about 50 to about 400 adenosine nucleotides, more preferably a sequence of about 50 to about 300 adenosine nucleotides, even more preferably a sequence of about 50 to about 250 adenosine nucleotides, most preferably a sequence of about 60 to about 250 adenosine nucleotides. In this context the term “about” refers to a deviation of ±10% of the value(s) it is attached to. This poly(A) sequence is preferably located 3′ of the coding region comprised in the at least one coding RNA as described herein.

[0593] Preferably, the poly(A) sequence in at least one coding RNA as described herein is derived from a DNA template by RNA in vitro transcription. Alternatively, the poly(A) sequence may also be obtained in vitro by common methods of chemical-synthesis without being necessarily transcribed from a DNA-progenitor. Moreover, poly(A) sequences, or poly(A) tails may be generated by enzymatic polyadenylation of the at least one RNA using commercially available polyadenylation kits and corresponding protocols known in the art.

[0594] Alternatively, the at least one coding RNA as described herein optionally comprises a polyadenylation signal, which is defined herein as a signal, which conveys polyadenylation to a (transcribed) RNA by specific protein factors (e.g. cleavage and polyadenylation specificity factor (CPSF), cleavage stimulation factor (CstF), cleavage factors I and II (CF I and CF II), poly(A) polymerase (PAP)). In this context, a consensus polyadenylation signal is preferred comprising the NN(U/T)ANA consensus sequence. In a particularly preferred aspect, the polyadenylation signal comprises one of the following sequences: AA(U/T)AAA or A(U/T)(U/T)AAA (wherein uridine is usually present in RNA and thymidine is usually present in DNA).

[0595] According to a further preferred embodiment, the at least one coding RNA as described herein can be modified by a sequence of at least 10 cytosines, preferably at least 20 cytosines, more preferably at least 30 cytosines (so-called “poly(C) sequence”). Particularly, the RNA may contain a poly(C) sequence of typically about 10 to 200 cytosine nucleotides, preferably about 10 to 100 cytosine nucleotides, more preferably about 10 to 70 cytosine nucleotides or even more preferably about 20 to 50 or even 20 to 30 cytosine nucleotides. This poly(C) sequence is preferably located 3′ of the coding region, more preferably 3′ of an optional poly(A) sequence comprised in the at least one coding RNA as described herein.

[0596] In a particularly preferred embodiment, the at least one coding RNA as described herein comprises a histone stem-loop sequence/structure. Such histone stem-loop sequences are preferably selected from histone stem-loop sequences as disclosed in WO 2012/019780, whose disclosure is incorporated herewith by reference.

[0597] A histone stem-loop sequence, suitable to be used within the present invention, is preferably selected from at least one of the following formulae (VII) or (VIII):

formula (VII) (stem-loop sequence without stem bordering elements):

[chemical structure]

formula (VIII) (stem-loop sequence with stem bordering elements):

[chemical structure]

wherein:
[0598] stem1 or stem2 bordering elements N₁₋₆ is a consecutive sequence of 1 to 6, preferably of 2 to 6, more preferably of 2 to 5, even more preferably of 3 to 5, most preferably of 4 to 5 or 5 N, wherein each N is independently from another selected from a nucleotide selected from A, U, T, G and C, or a nucleotide analogue thereof;
[0599] stem1 [N₀₋₂GN₃₋₅] is reverse complementary or partially reverse complementary with element stem2, and is a consecutive sequence between of 5 to 7 nucleotides;
   [0600] wherein N₀₋₂ is a consecutive sequence of 0 to 2, preferably of 0 to 1, more preferably of 1 N, wherein each N is independently from another selected from a nucleotide selected from A, U, T, G and C or a nucleotide analogue thereof;
   [0601] wherein N₃₋₅ is a consecutive sequence of 3 to 5, preferably of 4 to 5, more preferably of 4 N, wherein each N is independently from another selected from a nucleotide selected from A, U, T, G and C or a nucleotide analogue thereof, and
   [0602] wherein G is guanosine or an analogue thereof, and may be optionally replaced by a cytidine or an analogue thereof, provided that its complementary nucleotide cytidine in stem2 is replaced by guanosine;
[0603] loop sequence [N₀₋₄(U/T)N₀₋₄] is located between elements stem1 and stem2, and is a consecutive sequence of 3 to 5 nucleotides, more preferably of 4 nucleotides;
   [0604] wherein each N₀₋₄ is independent from another a consecutive sequence of 0 to 4, preferably of 1 to 3, more preferably of 1 to 2 N, wherein each N is independently from another selected from a nucleotide selected from A, U, T, G and C or a nucleotide analogue thereof; and
   [0605] wherein U/T represents uridine, or optionally thymidine;
[0606] stem2 [N₃₋₅CN₀₋₂] is reverse complementary or partially reverse complementary with element stem1, and is a consecutive sequence between of 5 to 7 nucleotides;
   [0607] wherein N₃₋₅ is a consecutive sequence of 3 to 5, preferably of 4 to 5, more preferably of 4 N, wherein each N is independently from another selected from a nucleotide selected from A, U, T, G and C or a nucleotide analogue thereof;
   [0608] wherein N₀₋₂ is a consecutive sequence of 0 to 2, preferably of 0 to 1, more preferably of 1 N, wherein each N is independently from another selected from a nucleotide selected from A, U, T, G or C or a nucleotide analogue thereof; and
   [0609] wherein C is cytidine or an analogue thereof, and may be optionally replaced by a guanosine or an analogue thereof provided that its complementary nucleoside guanosine in stem1 is replaced by cytidine;
      wherein
      stem1 and stem2 are capable of base pairing with each other forming a reverse complementary sequence, wherein base pairing may occur between stem1 and stem2, e.g. by Watson-Crick base pairing of nucleotides A and U/T or G and C or by non-Watson-Crick base pairing e.g. wobble base pairing, reverse Watson-Crick base pairing, Hoogsteen base pairing, reverse Hoogsteen base pairing or are capable of base pairing with each other forming a partially reverse complementary sequence, wherein an incomplete base pairing may occur between stem1 and stem2, on the basis that one ore more bases in one stem do not have a complementary base in the reverse complementary sequence of the other stem.

[0610] According to a further preferred embodiment of the first inventive aspect, the at least one mRNA of the inventive composition sequence may comprise at least one histone stem-loop sequence according to at least one of the following specific formulae (VIIa) or (VIIIa):

formula (VIIa) (stem-loop sequence without stem bordering elements):

[chemical structure]

formula (VIIIa) (stem-loop sequence with stem bordering elements):

[chemical structure]

wherein:
[0611] N, C, G, T and U are as defined above.

[0612] According to a further more particularly preferred embodiment of the first aspect, the at least one mRNA of the inventive composition sequence may comprise at least one histone stem-loop sequence according to at least one of the following specific formulae (VIIb) or (VIIIb):

formula (VIIb) (stem-loop sequence without stem bordering elements):

[chemical structure]

formula (VIIIb) (stem-loop sequence with stem bordering elements):

[chemical structure]

wherein:
[0613] N, C, G, T and U are as defined above.

[0614] A particular preferred histone stem-loop sequence is the sequence according to SEQ ID No: 426.

[0615] More preferably the stem-loop sequence is the corresponding RNA sequence of the nucleic acid sequence according to SEQ ID NO: 427.

[0616] According to another particularly preferred embodiment, the at least one coding RNA as described herein may additionally or alternatively encode a secretory signal peptide. Such signal peptides are sequences, which typically exhibit a length of about 15 to 30 amino acids and are preferably located at the N-terminus of the encoded peptide, without being limited thereto. Signal peptides as defined herein preferably allow the transport of the antigen, antigenic protein or antigenic peptide as encoded by the at least one coding RNA as described herein into a defined cellular compartment, preferably the cell surface, the endoplasmic reticulum (ER) or the endosomal-lysosomal compartment. Examples of secretory signal peptide sequences as defined herein include, without being limited thereto, signal sequences of classical or non-classical MHC-molecules (e.g. signal sequences of MHC I and II molecules, e.g. of the MHC class I molecule HLA-A*0201), signal sequences of cytokines or immunoglobulines as defined herein, signal sequences of the invariant chain of immunoglobulines or antibodies as defined herein, signal sequences of Lamp1, Tapasin, Erp57, Calretikulin, Calnexin, and further membrane associated proteins or of proteins associated with the endoplasmic reticulum (ER) or the endosomal-lysosomal compartment. Particularly preferably, signal sequences of MHC class I molecule HLA-A*0201 may be used according to the present invention.

[0617] In some embodiments, the at least one coding RNA as described herein, preferably an mRNA, comprises, preferably in 5′ to 3′ direction, the following elements:
[0618] a) a 5′-CAP structure, preferably m7GpppN,
[0619] b) at least one coding sequence encoding at least one peptide or protein comprising IL-12, a decoy PD-1 receptor, preferably a soluble PD-1 receptor as described herein, CD40L, an anti-CTLA4 antibody, and/or a tumor antigen or a fragment or variant of any of these proteins,
[0620] c) a 3′-UTR element comprising a nucleic acid sequence, which is derived from an α-globin gene, preferably comprising the corresponding RNA sequence of the nucleic acid sequence according to SEQ ID NO: 418, or a homolog, a fragment or a variant thereof,
[0621] d) a poly(A) tail, preferably consisting of 10 to 200, 10 to 100, 40 to 80 or 50 to 70 adenosine nucleotides,
[0622] e) a poly(C) tail, preferably consisting of 10 to 200, 10 to 100, 20 to 70, 20 to 60 or 10 to 40 cytosine nucleotides, and
[0623] f) a histone stem-loop, preferably comprising the RNA sequence according to SEQ ID NO: 427.

[0624] According to a preferred embodiment, the at least one coding RNA as described herein comprises
[0625] a) a nucleic acid sequence selected from the group consisting of SEQ ID NOs: 146-151; 157-162; 168-173; 179-184; 190-195; 201-206; 212-217; 223-228; 234-239; 245-250; 256-261 and 267-272, or a fragment or variant of any of these sequences, preferably from the group consisting of SEQ ID NOs: 153; 164; 175; 186; 197; 208; 219; 230; 241; 252; 263, 274; 992 and 598, or a fragment or variant of any of these sequences,
[0626] b) a nucleic acid sequence selected from the group consisting of SEQ ID NOs: 154; 165; 176; 187; 198; 209; 220; 231; 242; 253; 264, 275 and 596, or a fragment or variant of any of these sequences,
[0627] c) a nucleic acid sequence according to any one of SEQ ID NO: 860-874, 875-889 or 594, preferably according to SEQ ID NO: 594, or a fragment or variant of any of these nucleic acid sequences, and a nucleic acid sequence according to any one of SEQ ID NO: 890-904, 905-919 or 595, preferably according to SEQ ID NO: 595, or a fragment or variant of any of these nucleic acid sequences;
   [0628] or
   [0629] a nucleic acid sequence according to SEQ ID NO: 920-922 or 923-925, or a fragment or variant of any of these nucleic acid sequences, and/or
[0630] d) optionally, a nucleic acid sequence selected from the group consisting of SEQ ID NOs: 144; 155; 166; 177; 188; 199; 210; 221; 232; 243; 254 and 265 or a fragment or variant of any of these sequences, preferably from the group consisting of SEQ ID NOs: 145; 156; 167; 178; 189; 200; 211; 222; 233; 244; 255; 266 and 597, or a fragment or variant of any of these sequences.

[0631] According to a further embodiment, the at least one coding RNA as described herein comprises
[0632] a) a nucleic acid sequence selected from the group consisting of SEQ ID NOs: 146-151; 451-456; 157-162; 168-173; 179-184; 190-195; 201-206; 212-217; 223-228; 234-239; 245-250; 256-261 and 267-272, or a fragment or variant of any of these sequences, preferably from the group consisting of SEQ ID NOs: 153; 458; 164; 175; 186; 197; 208; 219; 230; 241; 252; 263, 274; 992 and 598, or a fragment or variant of any of these sequences,
[0633] b) a nucleic acid sequence selected from the group consisting of SEQ ID NOs: 154; 459; 165; 176; 187; 198; 209; 220; 231; 242; 253; 264, 275 and 596, or a fragment or variant of any of these sequences,
[0634] c) a nucleic acid sequence according to any one of SEQ ID NO: 860-874, 875-889 or 594, preferably according to SEQ ID NO: 594, or a fragment or variant of any of these nucleic acid sequences, and a nucleic acid sequence according to any one of SEQ ID NO: 890-904, 905-919 or 595, preferably according to SEQ ID NO: 595, or a fragment or variant of any of these nucleic acid sequences;
   [0635] or
   [0636] a nucleic acid sequence according to SEQ ID NO: 920-922 or 923-925, or a fragment or variant of any of these nucleic acid sequences, and/or
[0637] d) optionally, a nucleic acid sequence selected from the group consisting of SEQ ID NOs: 144; 449; 155; 166; 177; 188; 199; 210; 221; 232; 243; 254 and 265, or a fragment or variant of any of these sequences, preferably from the group consisting of SEQ ID NOs: 145; 450; 156; 167; 178; 189; 200; 211; 222; 233; 244; 255; 266 and 597, or a fragment or variant of any of these sequences.

[0638] In a preferred embodiment, the at least one coding RNA as described herein comprises
[0639] a) a nucleic acid sequence selected from the group consisting of SEQ ID NOs: 451-456; 157-162; 168-173; 179-184; 190-195; 201-206; 212-217; 223-228; 234-239; 245-250; 256-261 and 267-272, or a fragment or variant of any of these sequences, preferably from the group consisting of SEQ ID NOs: 164; 175; 186; 197; 208; 219; 230; 241; 252; 263, 274; 992 and 598, or a fragment or variant of any of these sequences,
[0640] b) a nucleic acid sequence selected from the group consisting of SEQ ID NOs: 459; 165; 176; 187; 198; 209; 220; 231; 242; 253; 264, 275 and 596, or a fragment or variant of any of these sequences,
[0641] c) a nucleic acid sequence according to any one of SEQ ID NO: 860-874, 875-889 or 594, preferably according to SEQ ID NO: 594, or a fragment or variant of any of these nucleic acid sequences, and a nucleic acid sequence according to any one of SEQ ID NO: 890-904, 905-919 or 595, preferably according to SEQ ID NO: 595, or a fragment or variant of any of these nucleic acid sequences;
   [0642] or
   [0643] a nucleic acid sequence according to SEQ ID NO: 920-922 or 923-925, or a fragment or variant of any of these nucleic acid sequences, and/or
[0644] d) optionally, a nucleic acid sequence selected from the group consisting of SEQ ID NOs: 144; 449; 166; 177; 188; 199; 210; 221; 232; 243; 254 and 265, or a fragment or variant of any of these sequences, preferably from the group consisting of SEQ ID NOs: 145; 450; 167; 178; 189; 200; 211; 222; 233; 244; 255; 266 and 597, or a fragment or variant of any of these sequences.

[0645] According to a particularly preferred embodiment, the present invention provides an isRNA for use in the treatment of a tumor or cancer disease as described herein, preferably comprising intratumoral administration of the isRNA, wherein the treatment comprises administration of at least three, preferably at least four or five, coding RNAs as described herein (as additional pharmaceutically active ingredients), preferably at least three, more preferably at least four or five, mRNAs, wherein

a first coding RNA comprises a nucleic acid sequence selected from the group consisting of SEQ ID NOs: 153; 164; 175; 186; 197; 208; 219; 230; 241; 252; 263; 274; 992 and 598, or a fragment or variant of any of these sequences, a second coding RNA comprises a nucleic acid sequence selected from the group consisting of SEQ ID NOs: 154; 165; 176; 187; 198; 209; 220; 231; 242; 253; 264; 275 and 596, or a fragment or variant of any of these sequences,
a third coding RNA comprises a nucleic acid sequence selected from the group consisting of a nucleic acid sequence according to any one of SEQ ID NO: 860-874 or 594, preferably according to SEQ ID NO: 594, or a fragment or variant of any of these nucleic acid sequences, and a nucleic acid sequence according to any one of SEQ ID NO: 890-904 or 595, preferably according to SEQ ID NO: 595, or a fragment or variant of any of these nucleic acid sequences, and/or optionally, a fourth coding RNA comprises a nucleic acid sequence selected from the group consisting of SEQ ID NOs: 145; 156; 167; 178; 189; 200; 211; 222; 233; 244; 255; 266 and 597, or a fragment or variant of any of these sequences,
wherein the first, the second, the third and the fourth coding RNAs are preferably administered intratumorally.

[0646] According to a particularly preferred embodiment, the present invention provides an isRNA for use in the treatment of a tumor or cancer disease as described herein, preferably comprising intratumoral administration of the isRNA, wherein the treatment comprises administration of at least three, preferably at least four or five, coding RNAs as described herein (as additional pharmaceutically active ingredients), preferably at least three, more preferably at least four or five, mRNAs, wherein
[0647] a) a first coding RNA comprises a nucleic acid sequence selected from the group consisting of SEQ ID NOs: 153; 164; 175; 186; 197; 208; 219; 230; 241; 252; 263; 274; 992 and 598, or a fragment or variant of any of these sequences,
[0648] b) a second coding RNA comprises a nucleic acid sequence selected from the group consisting of SEQ ID NOs: 154; 165; 176; 187; 198; 209; 220; 231; 242; 253; 264; 275 and 596, or a fragment or variant of any of these sequences,
[0649] c) a third coding RNA comprises a nucleic acid sequence selected from the group consisting of a nucleic acid sequence according to any one of SEQ ID NO: 860-874 or 594, preferably according to SEQ ID NO: 594, or a fragment or variant of any of these nucleic acid sequences, and a fourth coding RNA comprises a nucleic acid sequence according to any one of SEQ ID NO: 890-904 or 595, preferably according to SEQ ID NO: 595, or a fragment or variant of any of these nucleic acid sequences, and/or
[0650] d) optionally, a fifth coding RNA comprises a nucleic acid sequence selected from the group consisting of SEQ ID NOs: 145; 156; 167; 178; 189; 200; 211; 222; 233; 244; 255; 266 and 597, or a fragment or variant of any of these sequences
   wherein the first, the second, the third, the fourth and the fifth coding RNAs are preferably administered intratumorally.

[0651] In a particularly preferred embodiment, the present invention provides an isRNA for use in the treatment of a tumor or cancer disease as described herein, preferably comprising intratumoral administration of the isRNA, wherein the treatment comprises administration of at least three, preferably at least four of five, coding RNAs as described herein (as additional pharmaceutically active ingredients), preferably at least three, more preferably at least four or five, mRNAs, wherein
[0652] a) a first coding RNA comprises a nucleic acid sequence selected from the group consisting SEQ ID NOs: 164; 175; 186; 197; 208; 219; 230; 241; 252; 263; 274; 992 and 598, or a fragment or variant of any of these sequences,
[0653] b) a second coding RNA comprises a nucleic acid sequence selected from the group consisting of SEQ ID NOs: 165; 176; 187; 198; 209; 220; 231; 242; 253; 264; 275 and 596, or a fragment or variant of any of these sequences,
[0654] c) a third coding RNA comprises a nucleic acid sequence selected from the group consisting of a nucleic acid sequence according to any one of SEQ ID NO: 860-874 or 594, preferably according to SEQ ID NO: 594, or a fragment or variant of any of these nucleic acid sequences, and
   [0655] a fourth coding RNA comprises a nucleic acid sequence according to any one of SEQ ID NO: 890-904 or 595, preferably according to SEQ ID NO: 595, or a fragment or variant of any of these nucleic acid sequences, and/or
[0656] d) optionally, a fifth coding RNA comprises a nucleic acid sequence selected from the group consisting of SEQ ID NOs: 156; 167; 178; 189; 200; 211; 222; 233; 244; 255; 266 and 597, or a fragment or variant of any of these sequences,
   wherein the first, the second, the third, the fourth and the fifth coding RNAs are preferably administered intratumorally.

[0657] In certain embodiments, the at least one coding RNA as described herein, preferably an mRNA, comprises, preferably in 5′ to 3′ direction, the following elements:
[0658] a) a 5′-CAP structure, preferably m7GpppN,
[0659] b) a 5′-UTR element, which comprises or consists of a nucleic acid sequence, which is derived from the 5′-UTR of a TOP gene, preferably comprising an RNA sequence corresponding to the nucleic acid sequence according to SEQ ID NO: 408, or a homolog, a fragment or a variant thereof,
[0660] c) at least one coding sequence encoding at least one peptide or protein comprising IL-12, a decoy PD-1 receptor, preferably a soluble PD-1 receptor as described herein, CD40L, an anti-CTLA4 antibody, and/or a tumor antigen or a fragment or variant of any of these proteins,
[0661] d) a 3′-UTR element comprising a nucleic acid sequence, which is derived from an α-globin gene, preferably comprising the corresponding RNA sequence of the nucleic acid sequence according to SEQ ID NO: 418, or a homolog, a fragment or a variant thereof; and/or a 3′-UTR element comprising a nucleic acid sequence, which is derived from an albumin gene, preferably comprising the corresponding RNA sequence of the nucleic acid sequence according to SEQ ID NO: 422 or 424, or a homolog, a fragment or a variant of any of these sequences,
[0662] e) a poly(A) tail, preferably consisting of 10 to 200, 10 to 100, 40 to 80 or 50 to 70 adenosine nucleotides,
[0663] f) a poly(C) tail, preferably consisting of 10 to 200, 10 to 100, 20 to 70, 20 to 60 or 10 to 40 cytosine nucleotides, and
[0664] g) a histone stem-loop, preferably comprising the RNA sequence according to SEQ ID NO: 427.

[0665] According to a preferred embodiment, the at least one coding RNA as described herein comprises
[0666] a) a nucleic acid sequence selected from the group consisting of SEQ ID NOs: 278-283; 289-294; 300-305; 311-316; 322-327; 333-338; 344-349; 355-360; 366-371; 377-382; 388-393; 399-404 and 462-467, or a fragment or variant of any of these sequences, preferably from the group consisting of SEQ ID NOs: 285; 296; 307; 318; 329; 340; 351; 362; 373; 384; 395; 406; 430; 469 and 992, or a fragment or variant of any of these sequences,
[0667] b) a nucleic acid sequence selected from the group consisting of SEQ ID NO: 286; 297; 308; 319; 330; 341; 352; 363; 374; 385; 396; 470 and 407, or a fragment or variant of any of these sequences,
[0668] c) a nucleic acid sequence according to any one of SEQ ID NO: 926-940 or 941-955, preferably according to SEQ ID NO: 926-940, or a fragment or variant of any of these nucleic acid sequences, and a nucleic acid sequence according to any one of SEQ ID NO: 956-970 or 971-985, preferably according to SEQ ID NO: 956-970, or a fragment or variant of any of these nucleic acid sequences;
   [0669] or
   [0670] a nucleic acid sequence according to SEQ ID NO: 986-988 or 989-991, or a fragment or variant of any of these nucleic acid sequences, and/or
[0671] d) optionally, a nucleic acid sequence selected from the group consisting of SEQ ID NOs: 276; 287; 298; 309; 320; 331; 342; 353; 364; 375; 386; 460 and 397, or a fragment or variant of any of these sequences, preferably from the group consisting of SEQ ID NOs: 277; 288; 299; 310; 321; 332; 343; 354; 365; 376; 461; 387 and 398, or a fragment or variant of any of these sequences.

[0672] According to another embodiment, the at least one coding RNA as described herein comprises
[0673] a) a nucleic acid sequence selected from the group consisting of SEQ ID NOs: 289-294; 300-305; 311-316; 322-327; 333-338; 344-349; 355-360; 366-371; 377-382; 388-393 and 399-404, or a fragment or variant of any of these sequences,
[0674] b) a nucleic acid sequence selected from the group consisting of SEQ ID NO: 286; 297; 308; 319; 330; 341; 352; 363; 374; 385; 396 and 407, or a fragment or variant of any of these sequences,
[0675] c) a nucleic acid sequence according to any one of SEQ ID NO: 926-940 or 941-955, preferably according to SEQ ID NO: 926-940, or a fragment or variant of any of these nucleic acid sequences, and a nucleic acid sequence according to any one of SEQ ID NO: 956-970 or 971-985, preferably according to SEQ ID NO: 956-970, or a fragment or variant of any of these nucleic acid sequences;
   [0676] or
   [0677] a nucleic acid sequence according to SEQ ID NO: 986-988 or 989-991, or a fragment or variant of any of these nucleic acid sequences, and/or
[0678] d) optionally, a nucleic acid sequence selected from the group consisting of SEQ ID NOs: 296; 307; 318; 329; 340; 351; 362; 373; 384; 395; 406; 430 and 992, or a fragment or variant of any of these sequences, preferably from the group consisting of SEQ ID NOs: 277; 288; 299; 310; 321; 332; 343; 354; 365; 376; 387 and 398, or a fragment or variant of any of these sequences.

[0679] In a preferred embodiment, the at least one coding RNA as described herein comprises
[0680] a) a nucleic acid sequence selected from the group consisting of SEQ ID NOs: 278-283; 289-294; 300-305; 311-316; 322-327; 333-338; 344-349; 355-360; 366-371; 377-382; 388-393; 399-404 and 462-467, or a fragment or variant of any of these sequences, preferably from the group consisting of SEQ ID NOs: 285; 296; 307; 318; 329; 340; 351; 362; 373; 384; 395; 406; 430; 469 and 992, or a fragment or variant of any of these sequences,
[0681] b) a nucleic acid sequence selected from the group consisting of SEQ ID NO: 286; 297; 308; 319; 330; 341; 352; 363; 374; 385; 396 and 407, or a fragment or variant of any of these sequences,
[0682] c) a nucleic acid sequence according to any one of SEQ ID NO: 926-940 or 941-955, preferably according to SEQ ID NO: 926-940, or a fragment or variant of any of these nucleic acid sequences, and a nucleic acid sequence according to any one of SEQ ID NO: 956-970 or 971-985, preferably according to SEQ ID NO: 956-970, or a fragment or variant of any of these nucleic acid sequences;
   [0683] or
   [0684] a nucleic acid sequence according to SEQ ID NO: 986-988 or 989-991, or a fragment or variant of any of these nucleic acid sequences, and/or
[0685] d) optionally, a nucleic acid sequence selected from the group consisting of SEQ ID NOs: 276; 287; 298; 309; 320; 331; 342; 353; 364; 375; 386; 460 and 397, or a fragment or variant of any of these sequences, preferably from the group consisting of SEQ ID NOs: 277; 288; 299; 310; 321; 332; 343; 354; 365; 376; 461; 387 and 398, or a fragment or variant of any of these sequences.

[0686] According to a particularly preferred embodiment, the present invention provides an isRNA for use in the treatment of a tumor or cancer disease as described herein, preferably comprising intratumoral administration of the isRNA, wherein the treatment comprises administration of at least three, preferably at least four or five, coding RNAs as described herein (as additional pharmaceutically active ingredients), preferably at least three, more preferably at least four or five, mRNAs, wherein
[0687] a) a first coding RNA comprises a nucleic acid sequence selected from the group consisting of SEQ ID NOs: 285; 296; 307; 318; 329; 340; 351; 362; 373; 384; 395; 406; 430; 469 and 992, or a fragment or variant of any of these sequences,
[0688] b) a second coding RNA comprises a nucleic acid sequence selected from the group consisting of SEQ ID NOs: 286; 297; 308; 319; 330; 341; 352; 363; 374; 385; 396; 470 and 407, or a fragment or variant of any of these sequences,
[0689] c) a third coding RNA comprises a nucleic acid sequence selected from the group consisting of a nucleic acid sequence according to any one of SEQ ID NO: 926-940, or a fragment or variant of any of these nucleic acid sequences, and
   [0690] a fourth coding RNA comprises a nucleic acid sequence according to any one of SEQ ID NO: 956-970, or a fragment or variant of any of these nucleic acid sequences, and/or
[0691] d) optionally, a fifth coding RNA comprises a nucleic acid sequence selected from the group consisting of SEQ ID NOs: 277; 288; 299; 310; 321; 332; 343; 354; 365; 376; 387; 461 and 398, or a fragment or variant of any of these sequences;
   wherein the first, the second, the third, the fourth and the fifth coding RNAs are preferably administered intratumorally.

[0692] In a further preferred embodiment, the present invention provides an isRNA for use in the treatment of a tumor or cancer disease as described herein, preferably comprising intratumoral administration of the isRNA, wherein the treatment comprises administration of at least three, preferably at least four or five, coding RNAs as described herein (as additional pharmaceutically active ingredients), preferably at least three, more preferably at least four or five, mRNAs, wherein
[0693] a) a first coding RNA comprises a nucleic acid sequence selected from the group consisting of SEQ ID NOs: 285; 296; 307; 318; 329; 340; 351; 362; 373; 384; 395; 406; 430; 469 and 992, or a fragment or variant of any of these sequences,
[0694] b) a second coding RNA comprises a nucleic acid sequence selected from the group consisting of SEQ ID NOs: 286; 297; 308; 319; 330; 341; 352; 363; 374; 385; 396; 470 and 407, or a fragment or variant of any of these sequences,
[0695] c) a third coding RNA comprises a nucleic acid sequence selected from the group consisting of a nucleic acid sequence according to any one of SEQ ID NO: 926-940, or a fragment or variant of any of these nucleic acid sequences, and a fourth coding RNA comprises a nucleic acid sequence according to any one of SEQ ID NO: 956-970, or a fragment or variant of any of these nucleic acid sequences, and/or
[0696] d) optionally a fifth coding RNA comprises a nucleic acid sequence selected from the group consisting of SEQ ID NOs: 277; 288; 299; 310; 321; 332; 343; 354; 365; 376; 387; 461 and 398, or a fragment or variant of any of these sequences,
   wherein the first, the second, the third, the fourth and the fifth coding RNAs are preferably administered intratumorally.

[0697] According to a particularly preferred embodiment, the present invention provides an isRNA for use in the treatment of a tumor or cancer disease as described herein, preferably comprising intratumoral administration of the isRNA, wherein the treatment comprises administration of at least three, preferably at least four or five, coding RNAs as described herein (as additional pharmaceutically active ingredients), preferably at least three, more preferably at least four or five, mRNAs, wherein
[0698] a) a first coding RNA comprises a nucleic acid sequence selected from the group consisting of SEQ ID NOs: 285; 296; 307; 318; 329; 340; 351; 362; 373; 384; 395; 406; 430; 469 and 992, or a fragment or variant of any of these sequences,
[0699] b) a second coding RNA comprises a nucleic acid sequence selected from the group consisting of SEQ ID NOs: 286; 297; 308; 319; 330; 341; 352; 363; 374; 385; 396; 470 and 407, or a fragment or variant of any of these sequences,
[0700] c) a third coding RNA comprises a nucleic acid sequence selected from the group consisting of a nucleic acid sequence according to any one of SEQ ID NO: 926-940, or a fragment or variant of any of these nucleic acid sequences, and a fourth coding RNA comprises a nucleic acid sequence according to any one of SEQ ID NO: 956-970, or a fragment or variant of any of these nucleic acid sequences, and/or
[0701] b) optionally, a fifth coding RNA comprises a nucleic acid sequence selected from the group consisting of SEQ ID NOs: 277; 288; 299; 310; 321; 332; 343; 354; 365; 376; 387; 461 and 398, or a fragment or variant of any of these sequences;
   wherein the first, the second, the third, the fourth and the fifth coding RNAs are preferably administered intratumorally.

[0702] According to a preferred embodiment, the present invention relates to an isRNA for use in the treatment of a tumor or cancer disease as described herein, wherein the treatment comprises administration at least one coding RNA as described herein (as additional pharmaceutically active ingredient), wherein the isRNA is administered as RNA complexed with one or more cationic or polycationic compounds, preferably a polymeric carrier as described herein, and the at least one coding RNA, more preferably an mRNA, is administered as free RNA.

[0703] According to a further preferred embodiment, the invention provides an isRNA for use in the treatment of a tumor or cancer disease,

wherein the isRNA comprises a nucleic acid sequence according to formula (I) (GₗXₘGₙ), formula (II) (CₗXₘCₙ), formula (III) (NᵤGₗXₘGₙNᵥ)ₐ or formula (IV) (NᵤCₗXₘCₙNᵥ)ₐ, preferably at least one nucleic acid sequence according to any one of SEQ ID NOs: 433 to 437, 1014 to 1016, 1055 or 1056, or a fragment or variant of any of these sequences, more preferably according to any one of SEQ ID NOs: 433, 434, 1014 to 1016, or a fragment or a variant thereof,
wherein the isRNA is complexed with a cationic or polycationic compound, preferably with a polymeric carrier, more preferably with a polymeric carrier that is formed by a disulfide-crosslinked cationic component, which preferably comprises a peptide according to formula (V), (Va) and/or (Vb) and/or a compound according to formula (VI), more preferably at least one of the disulfide-crosslinked cationic peptides Cys-Arg₁₂, Cys-Arg₁₂-Cys, or Trp-Arg₁₂-Cys,
wherein the isRNA is preferably administered intratumorally,
wherein the tumor or cancer disease is preferably selected from the group consisting of
[0704] melanoma, preferably advanced and/or metastatic melanoma, more preferably advanced cutaneous melanoma (cMEL);
[0705] squamous cell cancer (SCC) of the skin, preferably unresectable and/or advanced SCC of the skin, more preferably cutaneous squamous cell carcinoma (cSCC), even more preferably unresectable and/or advanced cSCC;
[0706] squamous cell carcinoma of the head and neck (HNSCC), preferably advanced HNSCC, more preferably immunotherapy-refractory or platinum-refractory HNSCC, even more preferably immunotherapy-refractory advanced HNSCC or platinum-refractory advanced HNSCC;
[0707] adenocystic carcinoma (ACC), preferably advanced ACC;
[0708] cutaneous T-cell lymphoma, preferably advanced cutaneous T-cell lymphoma or cutaneous T-cell lymphoma of mycosis fungoides subtype, more preferably cutaneous T-cell lymphoma refractory to local treatment or to chemotherapy, even more preferably advanced cutaneous T-cell lymphoma refractory to local treatment or to chemotherapy, or cutaneous T-cell lymphoma of mycosis fungoides subtype refractory to local treatment or to chemotherapy, and
[0709] vulvar cancer, preferably vulvar squamous cell cancer (VSCC), more preferably advanced VSCC, even more preferably VSCC refractory to surgery or chemotherapy, most preferably advanced VSCC refractory to surgery or chemotherapy; or
   selected from the group consisting of cutaneous melanoma (cMEL), cutaneous squamous cell carcinoma (cSCC), head and neck squamous cell carcinoma (HNSCC), adenoid cystic carcinoma (ACC), cutaneous T-cell lymphoma, preferably cutaneous T-cell lymphoma of mycosis fungoides subtype, and vulvar squamous cell cancer (VSCC);
   wherein the tumor or the cancer disease is preferably at an advanced stage and/or refractory to standard therapy; wherein the treatment of a tumor or cancer disease comprises administration of at least three, preferably at least four or five, coding RNAs as described herein (as additional pharmaceutically active ingredients), preferably at least three, more preferably at least four or five, mRNAs, wherein
[0710] a) a first coding RNA comprises a nucleic acid sequence selected from the group consisting of SEQ ID NOs: 285; 296; 307; 318; 329; 340; 351; 362; 373; 384; 395; 406; 430; 469 and 992, or a fragment or variant of any of these sequences,
[0711] b) a second coding RNA comprises a nucleic acid sequence selected from the group consisting of SEQ ID NOs: 286; 297; 308; 319; 330; 341; 352; 363; 374; 385; 396; 470 and 407, or a fragment or variant of any of these sequences,
[0712] c) a third coding RNA comprises a nucleic acid sequence selected from the group consisting of a nucleic acid sequence according to any one of SEQ ID NO: 926-940, or a fragment or variant of any of these nucleic acid sequences, and
   [0713] a fourth coding RNA comprises a nucleic acid sequence according to any one of SEQ ID NO: 956-970, or a fragment or variant of any of these nucleic acid sequences, and/or
[0714] d) optionally, a fifth coding RNA comprises a nucleic acid sequence selected from the group consisting of SEQ ID NOs: 277; 288; 299; 310; 321; 332; 343; 354; 365; 376; 387; 461 and 398, or a fragment or variant of any of these sequences,
   wherein the first, the second, the third, the fourth and the fifth coding RNAs are preferably administered intratumorally.

[0715] According to a further aspect of the present invention, a combination of an isRNA and at least one coding RNA is provided, wherein the at least one coding RNA encodes at least one peptide or protein comprising IL 12, CD40L, a decoy PD 1 receptor, preferably a soluble PD-1 receptor, and an anti-CTLA4 antibody, or a fragment or variant of any of these proteins.

[0716] The isRNA in the combination according to the invention is preferably an isRNA as described herein with respect to the isRNA for use in the treatment of a tumor or cancer disease. The at least one coding RNA of the combination according to the invention is preferably a coding RNA as described herein, more preferably a coding RNA as described herein with respect to the at least one coding RNA that is used as an additional pharmaceutically active ingredient. Additionally or alternatively the at least one coding RNA may encode at least one tumor antigen, preferably as defined herein, or a fragment or variant thereof.

[0717] In a preferred embodiment, the combination comprises an isRNA and at least one coding RNA, which are formulated together or separately, preferably as described herein.

[0718] Independent of their formulation, the isRNA and the at least one coding RNA may preferably be administered concomitantly. Alternatively, the isRNA and the at least one coding RNA of the combination may be administered in a time-staggered manner.

[0719] The phrases “administered in combination”, co-administration or “concomitant administration” as used herein refer to a situation, where one pharmaceutically active ingredient, such as the isRNA described herein, is administered to a subject before, concomittantly or after the administration of at least one additional pharmaceutically active ingredient, such as the at least one coding RNA as described herein, to the same subject. The time interval between the administration of the pharmaceutically active ingredients depends on the nature and biological effect of the particular pharmaceutically active component and can be determined by a physician. Preferably, the time interval is less than about 48 hours, more preferably less than about 24 hours, 12 hours, 6 hours, 4 hours, 2 hours, 1 hour, most preferably less than about 30 minutes, 15 minutes or 5 minutes. In a particularly preferred embodiment, the phrase “administered in combination” refers to concomitant administration of pharmaceutically active ingredients, i.e. the simultaneous administration of at least two compounds or the administration of at least two compounds within a time frame that typically comprises less than 5 minutes. The phrase “administered in combination” does not only refer to a situation, where the pharmaceutically active ingredients are in physical contact with each other or formulated together. The phrase “administered in combination” as used herein comprises also the separate administration of the pharmaceutically active ingredients (e.g. by two separate injections). Alternatively, one pharmaceutically active ingredient, such as the isRNA described herein, may be administered in combination by mixing the ingredient with at least one additional pharmaceutically active ingredient, such as the at least one coding RNA, prior to administration and administering the mixture to a subject.

[0720] The phrases “administered in combination”, co-administration or “concomitant administration” as used herein further comprise a situation, wherein one pharmaceutically active ingredient, such as the isRNA described herein, is administered to a subject before, concomittantly or after, more preferably after, the administration of at least one additional pharmaceutically active ingredient, such as the at least one coding RNA as described herein, to the same subject. In some embodiments, the time interval between the administration of the pharmaceutically active ingredients is at least one, two, three, four, five, six, seven, eight, nine, ten, fifteen, twenty or thirty minutes. In certain embodiments, the isRNA is administered at least one, two, three, four, five, six, seven, eight, nine, ten, fifteen, twenty or thirty minutes after administration of the at least one coding RNA as described herein.

[0721] The isRNA and the at least one coding RNA of the combination according to the invention are preferably administered at the same site or at different sites, preferably by injection. Most preferably, at least one of the isRNA and the at least one coding RNA of the combination, preferably both, are administered intratumorally, preferably as described herein.

[0722] In another aspect, the invention provides the combination of an isRNA and at least one coding RNA as described herein for use as a medicament. The invention further provides the combination of an isRNA and at least one coding RNA for use in the manufacture of a medicament.

[0723] According to one embodiment, the combination as described herein is provided for use in the treatment or prophylaxis of a disease selected from the group consisting of tumor and cancer diseases, infectious diseases, allergies and autoimmune diseases. In a preferred embodiment, the combination as described herein is provided for use in the treatment or prophylaxis of a tumor or cancer disease, preferably as defined herein. According to a particularly preferred embodiment, the combination is for use in the treatment or prophylaxis of melanoma, preferably advanced and/or metastatic melanoma, most preferably advanced cutaneous melanoma (cMEL), squamous cell cancer of the skin (SCC), preferably unresectable and/or advanced SCC, most preferably cutaneous squamous cell carcinoma (cSCC), or other forms of malignant skin cancer, adenocystic carcinoma (ACC), preferably advanced ACC, cutaneous T-cell lymphoma, preferably advanced cutaneous T-cell lymphoma, and squamous cell carcinoma of the head and neck (HNSCC), preferably advanced HNSCC. Alternatively, the combination is for use in the treatment or prophylaxis of
[0724] melanoma, preferably advanced and/or metastatic melanoma, more preferably advanced cutaneous melanoma (cMEL);
[0725] squamous cell cancer (SCC) of the skin, preferably unresectable and/or advanced SCC of the skin, more preferably cutaneous squamous cell carcinoma (cSCC), even more preferably unresectable and/or advanced cSCC;
[0726] squamous cell carcinoma of the head and neck (HNSCC), preferably advanced HNSCC, more preferably immunotherapy-refractory or platinum-refractory HNSCC, even more preferably immunotherapy-refractory advanced HNSCC or platinum-refractory advanced HNSCC;
[0727] adenocystic carcinoma (ACC), preferably advanced ACC;
[0728] cutaneous T-cell lymphoma, preferably advanced cutaneous T-cell lymphoma or cutaneous T-cell lymphoma of mycosis fungoides subtype, more preferably cutaneous T-cell lymphoma refractory to local treatment or to chemotherapy, even more preferably advanced cutaneous T-cell lymphoma refractory to local treatment or to chemotherapy, or cutaneous T-cell lymphoma of mycosis fungoides subtype refractory to local treatment or to chemotherapy, and
[0729] vulvar cancer, preferably vulvar squamous cell cancer (VSCC), more preferably advanced VSCC, even more preferably VSCC refractory to surgery or chemotherapy, most preferably advanced VSCC refractory to surgery or chemotherapy; or
   for treatment or prophylaxis of a tumor or cancer disease selected from the group consisting of cutaneous melanoma (cMEL), cutaneous squamous cell carcinoma (cSCC), head and neck squamous cell carcinoma (HNSCC), adenoid cystic carcinoma (ACC), cutaneous T-cell lymphoma, preferably cutaneous T-cell lymphoma of mycosis fungoides subtype, and vulvar squamous cell cancer (VSCC), wherein the tumor or the cancer disease is preferably at an advanced stage and/or refractory to standard therapy.

[0730] Preferably, the combination as described herein is for use in the treatment or prophylaxis of a disease as described herein, wherein the treatment or prophylaxis comprises administration of at least one additional pharmaceutically active ingredient, preferably as described herein. In a preferred embodiment, the combination is for use in the treatment or prophylaxis of
[0731] melanoma, preferably advanced and/or metastatic melanoma, more preferably advanced cutaneous melanoma (cMEL);
[0732] squamous cell cancer (SCC) of the skin, preferably unresectable and/or advanced SCC of the skin, more preferably cutaneous squamous cell carcinoma (cSCC), even more preferably unresectable and/or advanced cSCC;
[0733] squamous cell carcinoma of the head and neck (HNSCC), preferably advanced HNSCC, more preferably immunotherapy-refractory or platinum-refractory HNSCC, even more preferably immunotherapy-refractory advanced HNSCC or platinum-refractory advanced HNSCC;
[0734] adenocystic carcinoma (ACC), preferably advanced ACC;
[0735] cutaneous T-cell lymphoma, preferably advanced cutaneous T-cell lymphoma or cutaneous T-cell lymphoma of mycosis fungoides subtype, more preferably cutaneous T-cell lymphoma refractory to local treatment or to chemotherapy, even more preferably advanced cutaneous T-cell lymphoma refractory to local treatment or to chemotherapy, or cutaneous T-cell lymphoma of mycosis fungoides subtype refractory to local treatment or to chemotherapy, and
[0736] vulvar cancer, preferably vulvar squamous cell cancer (VSCC), more preferably advanced VSCC, even more preferably VSCC refractory to surgery or chemotherapy, most preferably advanced VSCC refractory to surgery or chemotherapy; or
   for treatment or prophylaxis of a tumor or cancer disease selected from the group consisting of cutaneous melanoma (cMEL), cutaneous squamous cell carcinoma (cSCC), head and neck squamous cell carcinoma (HNSCC), adenoid cystic carcinoma (ACC), cutaneous T-cell lymphoma, preferably cutaneous T-cell lymphoma of mycosis fungoides subtype, and vulvar squamous cell cancer (VSCC), wherein the tumor or the cancer disease is preferably at an advanced stage and/or refractory to standard therapy;
   wherein the treatment or prophylaxis comprises administration of at least one additional pharmaceutically active ingredient, wherein the at least one additional pharmaceutically active ingredient is a compound conventionally used in the treatment or prophylaxis of any of said diseases, preferably a compound as described herein in that context.

[0737] According to a particularly preferred embodiment, the combination as described herein is for use in the treatment or prophylaxis of
[0738] melanoma, preferably advanced and/or metastatic melanoma, more preferably advanced cutaneous melanoma (cMEL);
[0739] squamous cell cancer (SCC) of the skin, preferably unresectable and/or advanced SCC of the skin, more preferably cutaneous squamous cell carcinoma (cSCC), even more preferably unresectable and/or advanced cSCC;
[0740] squamous cell carcinoma of the head and neck (HNSCC), preferably advanced HNSCC, more preferably immunotherapy-refractory or platinum-refractory HNSCC, even more preferably immunotherapy-refractory advanced HNSCC or platinum-refractory advanced HNSCC;
[0741] adenocystic carcinoma (ACC), preferably advanced ACC;
[0742] cutaneous T-cell lymphoma, preferably advanced cutaneous T-cell lymphoma or cutaneous T-cell lymphoma of mycosis fungoides subtype, more preferably cutaneous T-cell lymphoma refractory to local treatment or to chemotherapy, even more preferably advanced cutaneous T-cell lymphoma refractory to local treatment or to chemotherapy, or cutaneous T-cell lymphoma of mycosis fungoides subtype refractory to local treatment or to chemotherapy, and
[0743] vulvar cancer, preferably vulvar squamous cell cancer (VSCC), more preferably advanced VSCC, even more preferably VSCC refractory to surgery or chemotherapy, most preferably advanced VSCC refractory to surgery or chemotherapy; or
   for treatment or prophylaxis of a tumor or cancer disease selected from the group consisting of cutaneous melanoma (cMEL), cutaneous squamous cell carcinoma (cSCC), head and neck squamous cell carcinoma (HNSCC), adenoid cystic carcinoma (ACC), cutaneous T-cell lymphoma, preferably cutaneous T-cell lymphoma of mycosis fungoides subtype, and vulvar squamous cell cancer (VSCC), wherein the tumor or the cancer disease is preferably at an advanced stage and/or refractory to standard therapy;
   wherein the treatment or prophylaxis comprises administration of a PD 1 inhibitor or a PD-L1 inhibitor, preferably as described herein, more preferably an antagonistic antibody directed against PD-1 or PD-L1.

[0744] In a further preferred embodiment, the combination as described herein is for use in the treatment or prophylaxis of
[0745] melanoma, preferably advanced and/or metastatic melanoma, more preferably advanced cutaneous melanoma (cMEL);
[0746] squamous cell cancer (SCC) of the skin, preferably unresectable and/or advanced SCC of the skin, more preferably cutaneous squamous cell carcinoma (cSCC), even more preferably unresectable and/or advanced cSCC;
[0747] squamous cell carcinoma of the head and neck (HNSCC), preferably advanced HNSCC, more preferably immunotherapy-refractory or platinum-refractory HNSCC, even more preferably immunotherapy-refractory advanced HNSCC or platinum-refractory advanced HNSCC;
[0748] adenocystic carcinoma (ACC), preferably advanced ACC;
[0749] cutaneous T-cell lymphoma, preferably advanced cutaneous T-cell lymphoma or cutaneous T-cell lymphoma of mycosis fungoides subtype, more preferably cutaneous T-cell lymphoma refractory to local treatment or to chemotherapy, even more preferably advanced cutaneous T-cell lymphoma refractory to local treatment or to chemotherapy, or cutaneous T-cell lymphoma of mycosis fungoides subtype refractory to local treatment or to chemotherapy, and
[0750] vulvar cancer, preferably vulvar squamous cell cancer (VSCC), more preferably advanced VSCC, even more preferably VSCC refractory to surgery or chemotherapy, most preferably advanced VSCC refractory to surgery or chemotherapy; or
   for treatment or prophylaxis of a tumor or cancer disease selected from the group consisting of cutaneous melanoma (cMEL), cutaneous squamous cell carcinoma (cSCC), head and neck squamous cell carcinoma (HNSCC), adenoid cystic carcinoma (ACC), cutaneous T-cell lymphoma, preferably cutaneous T-cell lymphoma of mycosis fungoides subtype, and vulvar squamous cell cancer (VSCC), wherein the tumor or the cancer disease is preferably at an advanced stage and/or refractory to standard therapy;
   wherein the treatment or prophylaxis comprises administration of an anti-CTLA4 antibody, preferably as described herein.

[0751] In a further aspect, the present invention concerns a coding RNA as described herein. The coding RNA according to the invention is typically characterized by any one of the features described herein in the context of the at least one coding RNA that may also be used as an additional pharmaceutically active ingredient as described herein with respect to the isRNA for use according to the invention. In particular, the coding RNA according to the invention encodes a peptide or protein comprising at least one peptide or protein selected from the group consisting of IL 12, CD40L, a decoy PD-1 receptor, preferably a soluble PD-1 receptor, an anti-CTLA4 antibody, and a tumor antigen, or a fragment or variant of any of these proteins.

[0752] According to a preferred embodiment, the coding RNA according to the invention encodes a peptide or protein comprising IL 12, CD40L and a decoy PD-1 receptor, preferably a soluble PD-1 receptor, or a fragment or variant of any of these proteins. For example, the coding RNA encoding said peptide or protein may be a multicistronic RNA comprising three open reading frames, wherein each open reading frame encodes a different peptide or protein selected from the group consisting of IL 12, CD40L, a decoy PD-1 receptor, preferably a soluble PD-1 receptor, an anti-CTLA4 antibody, and a tumor antigen, or a fragment or variant of any of these proteins.

[0753] In a further aspect, the present invention concerns the coding RNA according to the invention for use in the treatment or prophylaxis of a disease selected from the group consisting of tumor and cancer diseases, infectious diseases, allergies and autoimmune diseases. In a preferred embodiment, the coding RNA as described herein is provided for use in the treatment or prophylaxis of a tumor or cancer disease, preferably as defined herein. According to a particularly preferred embodiment, the coding RNA is for use in the treatment or prophylaxis of melanoma, preferably advanced and/or metastatic melanoma, most preferably advanced cutaneous melanoma (cMEL), squamous cell cancer of the skin (SCC), preferably unresectable and/or advanced SCC, most preferably cutaneous squamous cell carcinoma (cSCC), or other forms of malignant skin cancer, adenocystic carcinoma (ACC), preferably advanced ACC, cutaneous T-cell lymphoma, preferably advanced cutaneous T-cell lymphoma, and squamous cell carcinoma of the head and neck (HNSCC), preferably advanced HNSCC. In a further preferred embodiment, the coding RNA is for use in the treatment or prophylaxis of
[0754] melanoma, preferably advanced and/or metastatic melanoma, more preferably advanced cutaneous melanoma (cMEL);
[0755] squamous cell cancer (SCC) of the skin, preferably unresectable and/or advanced SCC of the skin, more preferably cutaneous squamous cell carcinoma (cSCC), even more preferably unresectable and/or advanced cSCC;
[0756] squamous cell carcinoma of the head and neck (HNSCC), preferably advanced HNSCC, more preferably immunotherapy-refractory or platinum-refractory HNSCC, even more preferably immunotherapy-refractory advanced HNSCC or platinum-refractory advanced HNSCC;
[0757] adenocystic carcinoma (ACC), preferably advanced ACC;
[0758] cutaneous T-cell lymphoma, preferably advanced cutaneous T-cell lymphoma or cutaneous T-cell lymphoma of mycosis fungoides subtype, more preferably cutaneous T-cell lymphoma refractory to local treatment or to chemotherapy, even more preferably advanced cutaneous T-cell lymphoma refractory to local treatment or to chemotherapy, or cutaneous T-cell lymphoma of mycosis fungoides subtype refractory to local treatment or to chemotherapy, and
[0759] vulvar cancer, preferably vulvar squamous cell cancer (VSCC), more preferably advanced VSCC, even more preferably VSCC refractory to surgery or chemotherapy, most preferably advanced VSCC refractory to surgery or chemotherapy; or
   for treatment or prophylaxis of a tumor or cancer disease selected from the group consisting of cutaneous melanoma (cMEL), cutaneous squamous cell carcinoma (cSCC), head and neck squamous cell carcinoma (HNSCC), adenoid cystic carcinoma (ACC), cutaneous T-cell lymphoma, preferably cutaneous T-cell lymphoma of mycosis fungoides subtype, and vulvar squamous cell cancer (VSCC), wherein the tumor or the cancer disease is preferably at an advanced stage and/or refractory to standard therapy.

[0760] The coding RNA according to the invention is preferably provided for use in the treatment or prophylaxis of a disease as described herein, preferably in the treatment or prophylaxis of melanoma, preferably advanced and/or metastatic melanoma, most preferably advanced cutaneous melanoma (cMEL), squamous cell cancer of the skin (SCC), preferably unresectable and/or advanced SCC, most preferably cutaneous squamous cell carcinoma (cSCC), or other forms of malignant skin cancer, adenocystic carcinoma (ACC), preferably advanced ACC, cutaneous T-cell lymphoma, preferably advanced cutaneous T-cell lymphoma, and squamous cell carcinoma of the head and neck (HNSCC), preferably advanced HNSCC;

wherein the coding RNA comprises at least one coding sequence encoding a peptide or protein comprising IL-12, CD40L or a decoy PD-1 receptor, preferably a soluble PD-1 receptor, or a fragment or variant thereof, and wherein the treatment or prophylaxis comprises administration of a second coding RNA and/or a third coding RNA, wherein the second or third coding RNA comprises at least one coding sequence encoding a peptide or protein comprising CD40L or a decoy PD 1 receptor, preferably a soluble PD-1 receptor, or a fragment or variant thereof, so that the peptide(s) or protein(s) encoded by the coding RNAs together comprise IL-12, CD40L or a decoy PD-1 receptor, preferably a soluble PD-1 receptor, or a fragment or variant thereof. Therein, the coding RNA as well as the second and/or third coding RNAs are preferably coding RNAs as described herein.

[0761] The coding RNA according to the invention is preferably provided for use in the treatment or prophylaxis of a disease as described herein, preferably in the treatment or prophylaxis of
[0762] melanoma, preferably advanced and/or metastatic melanoma, more preferably advanced cutaneous melanoma (cMEL);
[0763] squamous cell cancer (SCC) of the skin, preferably unresectable and/or advanced SCC of the skin, more preferably cutaneous squamous cell carcinoma (cSCC), even more preferably unresectable and/or advanced cSCC;
[0764] squamous cell carcinoma of the head and neck (HNSCC), preferably advanced HNSCC, more preferably immunotherapy-refractory or platinum-refractory HNSCC, even more preferably immunotherapy-refractory advanced HNSCC or platinum-refractory advanced HNSCC;
[0765] adenocystic carcinoma (ACC), preferably advanced ACC;
[0766] cutaneous T-cell lymphoma, preferably advanced cutaneous T-cell lymphoma or cutaneous T-cell lymphoma of mycosis fungoides subtype, more preferably cutaneous T-cell lymphoma refractory to local treatment or to chemotherapy, even more preferably advanced cutaneous T-cell lymphoma refractory to local treatment or to chemotherapy, or cutaneous T-cell lymphoma of mycosis fungoides subtype refractory to local treatment or to chemotherapy, and
[0767] vulvar cancer, preferably vulvar squamous cell cancer (VSCC), more preferably advanced VSCC, even more preferably VSCC refractory to surgery or chemotherapy, most preferably advanced VSCC refractory to surgery or chemotherapy; or
   for treatment or prophylaxis of a tumor or cancer disease selected from the group consisting of cutaneous melanoma (cMEL), cutaneous squamous cell carcinoma (cSCC), head and neck squamous cell carcinoma (HNSCC), adenoid cystic carcinoma (ACC), cutaneous T-cell lymphoma, preferably cutaneous T-cell lymphoma of mycosis fungoides subtype, and vulvar squamous cell cancer (VSCC), wherein the tumor or the cancer disease is preferably at an advanced stage and/or refractory to standard therapy;
   wherein the coding RNA comprises at least one coding sequence encoding a peptide or protein comprising IL-12, CD40L, a decoy PD-1 receptor, preferably a soluble PD-1 receptor, or an anti-CTLA4 antibody, or a fragment or variant of any of these peptides or proteins, and wherein the treatment or prophylaxis comprises administration of a second coding RNA, a third coding RNA and/or a fourth coding RNA, wherein the second, third or fourth coding RNA comprises at least one coding sequence encoding a peptide or protein comprising IL12, CD40L, a decoy PD 1 receptor, preferably a soluble PD-1 receptor, or an anti-CTLA4 antibody or a fragment or variant thereof, so that the peptide(s) or protein(s) encoded by the coding RNAs together comprise IL-12, CD40L, a decoy PD-1 receptor, preferably a soluble PD-1 receptor, and an anti-CTLA4 antibody, or a fragment or variant thereof. Therein, the coding RNA as well as the second, third or fourth coding RNAs are preferably coding RNAs as described herein.

[0768] In certain embodiments, the coding RNA is provided for use in the treatment or prophylaxis of a disease as described herein, wherein the treatment or prophylaxis further comprises chemotherapy, radiation therapy and/or surgery. According to a preferred embodiment, the treatment or prophylaxis comprises the administration of at least one additional pharmaceutically active ingredient. In a further preferred embodiment, the treatment or prophylaxis comprises the administration of a compound that is conventionally used in the treatment of
[0769] melanoma, preferably advanced and/or metastatic melanoma, more preferably advanced cutaneous melanoma (cMEL);
[0770] squamous cell cancer (SCC) of the skin, preferably unresectable and/or advanced SCC of the skin, more preferably cutaneous squamous cell carcinoma (cSCC), even more preferably unresectable and/or advanced cSCC;
[0771] squamous cell carcinoma of the head and neck (HNSCC), preferably advanced HNSCC, more preferably immunotherapy-refractory or platinum-refractory HNSCC, even more preferably immunotherapy-refractory advanced HNSCC or platinum-refractory advanced HNSCC;
[0772] adenocystic carcinoma (ACC), preferably advanced ACC;
[0773] cutaneous T-cell lymphoma, preferably advanced cutaneous T-cell lymphoma or cutaneous T-cell lymphoma of mycosis fungoides subtype, more preferably cutaneous T-cell lymphoma refractory to local treatment or to chemotherapy, even more preferably advanced cutaneous T-cell lymphoma refractory to local treatment or to chemotherapy, or cutaneous T-cell lymphoma of mycosis fungoides subtype refractory to local treatment or to chemotherapy, and
[0774] vulvar cancer, preferably vulvar squamous cell cancer (VSCC), more preferably advanced VSCC, even more preferably VSCC refractory to surgery or chemotherapy, most preferably advanced VSCC refractory to surgery or chemotherapy; or
   in the treatment or prophylaxis of a tumor or cancer disease selected from the group consisting of cutaneous melanoma (cMEL), cutaneous squamous cell carcinoma (cSCC), head and neck squamous cell carcinoma (HNSCC), adenoid cystic carcinoma (ACC), cutaneous T-cell lymphoma, preferably cutaneous T-cell lymphoma of mycosis fungoides subtype, and vulvar squamous cell cancer (VSCC), wherein the tumor or the cancer disease is preferably at an advanced stage and/or refractory to standard therapy;
   preferably a compound as described herein in that context. More preferably, the treatment or prophylaxis comprises the administration of a PD 1 inhibitor or a PD L1 inhibitor, preferably an antagonistic antibody directed against PD-1 or PD-L1. In a particularly preferred embodiment, the treatment or prophylaxis comprises the administration, preferably intratumorally, of an isRNA, preferably an isRNA as described herein.

[0775] In some embodiments, the treatment or prophylaxis comprises the administration of a compound that is conventionally used in the treatment of
[0776] melanoma, preferably advanced and/or metastatic melanoma, more preferably advanced cutaneous melanoma (cMEL);
[0777] squamous cell cancer (SCC) of the skin, preferably unresectable and/or advanced SCC of the skin, more preferably cutaneous squamous cell carcinoma (cSCC), even more preferably unresectable and/or advanced cSCC;
[0778] squamous cell carcinoma of the head and neck (HNSCC), preferably advanced HNSCC, more preferably immunotherapy-refractory or platinum-refractory HNSCC, even more preferably immunotherapy-refractory advanced HNSCC or platinum-refractory advanced HNSCC;
[0779] adenocystic carcinoma (ACC), preferably advanced ACC;
[0780] cutaneous T-cell lymphoma, preferably advanced cutaneous T-cell lymphoma or cutaneous T-cell lymphoma of mycosis fungoides subtype, more preferably cutaneous T-cell lymphoma refractory to local treatment or to chemotherapy, even more preferably advanced cutaneous T-cell lymphoma refractory to local treatment or to chemotherapy, or cutaneous T-cell lymphoma of mycosis fungoides subtype refractory to local treatment or to chemotherapy, and
[0781] vulvar cancer, preferably vulvar squamous cell cancer (VSCC), more preferably advanced VSCC, even more preferably VSCC refractory to surgery or chemotherapy, most preferably advanced VSCC refractory to surgery or chemotherapy; or
   in the treatment or prophylaxis of a tumor or cancer disease selected from the group consisting of cutaneous melanoma (cMEL), cutaneous squamous cell carcinoma (cSCC), head and neck squamous cell carcinoma (HNSCC), adenoid cystic carcinoma (ACC), cutaneous T-cell lymphoma, preferably cutaneous T-cell lymphoma of mycosis fungoides subtype, and vulvar squamous cell cancer (VSCC), wherein the tumor or the cancer disease is preferably at an advanced stage and/or refractory to standard therapy; preferably a compound as described herein in that context. More preferably, the treatment or prophylaxis comprises the administration of an anti-CTLA4 antibody. In a particularly preferred embodiment, the treatment or prophylaxis comprises the administration, preferably intratumorally, of an isRNA, preferably an isRNA as described herein.

[0782] The coding RNA for use as described herein is preferably administered intratumorally. In a particularly preferred embodiment, the coding RNA for use as described herein is administered intratumorally.

[0783] In a further aspect, the present invention provides a pharmaceutical composition comprising an isRNA, preferably as described herein, at least one coding RNA, preferably as described herein, or the combination thereof, wherein the pharmaceutical composition comprises a pharmaceutically acceptable carrier and/or vehicle.

[0784] Preferably, the pharmaceutical composition is prepared for intratumoral application, preferably by injection into tumor tissue. Sterile injectable forms of the inventive pharmaceutical composition may be aqueous or oleaginous suspension. These suspensions may be formulated according to techniques known in the art using suitable dispersing or wetting agents and suspending agents.

[0785] A pharmaceutically acceptable carrier typically includes the liquid or non-liquid basis of a composition comprising an isRNA, preferably as described herein, at least one coding RNA, preferably as described herein, or the combination thereof as described herein. If the composition is provided in liquid form, the carrier will typically be pyrogen-free water; isotonic saline or buffered (aqueous) solutions, e.g. phosphate, citrate etc. buffered solutions. The injection buffer may be hypertonic, isotonic or hypotonic with reference to the specific reference medium, i.e. the buffer may have a higher, identical or lower salt content with reference to the specific reference medium, wherein preferably such concentrations of the afore mentioned salts may be used, which do not lead to damage of cells due to osmosis or other concentration effects. Reference media are e.g. liquids occurring in “in vivo” methods, such as blood, lymph, cytosolic liquids, or other body liquids, or e.g. liquids, which may be used as reference media in “in vitro” methods, such as common buffers or liquids. Such common buffers or liquids are known to a skilled person. Ringer-Lactate solution is particularly preferred as a liquid basis.

[0786] However, one or more compatible solid or liquid fillers or diluents or encapsulating compounds, which are suitable for administration to a patient to be treated, may be used as well for the pharmaceutical composition according to the invention. The term “compatible” as used herein means that these constituents of the inventive pharmaceutical composition are capable of being mixed with the components of the inventive pharmaceutical composition in such a manner that no interaction occurs which would substantially reduce the pharmaceutical effectiveness of the pharmaceutical composition under typical use conditions.

[0787] The inventive pharmaceutical composition may comprise further components for facilitating administration and uptake of components of the pharmaceutical composition. Such further components may be an appropriate carrier or vehicle, additional adjuvants for supporting any immune response, antibacterial and/or antiviral agents.

[0788] A further component of the inventive pharmaceutical composition may be an immunotherapeutic agent that can be selected from immunoglobulins, preferably IgGs, monoclonal or polyclonal antibodies, polyclonal serum or sera, etc. Preferably, such a further immunotherapeutic agent may be provided as a peptide/protein or may be encoded by a nucleic acid, preferably by a DNA or an RNA, more preferably an mRNA.

[0789] The inventive pharmaceutical composition typically comprises a “safe and effective amount” of the components of the inventive pharmaceutical composition, particularly of the isRNA, the coding RNA as defined herein or the combination thereof as defined herein. As used herein, a “safe and effective amount” means an amount of the RNA molecule(s) as defined herein as such that is sufficient to significantly induce a positive modification of the disease, preferably of a tumor or cancer disease. At the same time, however, a “safe and effective amount” is small enough to avoid serious side-effects and to permit a sensible relationship between advantage and risk. The determination of these limits typically lies within the scope of sensible medical judgment.

[0790] The inventive pharmaceutical composition may be used for human and also for veterinary medical purposes, preferably for human medical purposes, as a pharmaceutical composition in general.

[0791] According to another particularly preferred aspect, the pharmaceutical composition as described herein may be provided or used as a vaccine. Typically, such a vaccine is as defined above for pharmaceutical compositions. Preferably, such a vaccine typically contains the isRNA as described herein, the at least one coding RNA as described herein or the combination thereof as described herein. The vaccine may also comprise a pharmaceutically acceptable carrier, adjuvant, and/or vehicle as defined herein for the pharmaceutical composition. In the specific context of the vaccine, the choice of a pharmaceutically acceptable carrier is determined in principle by the manner, in which the inventive vaccine is administered. The vaccine may preferably be administered locally into tumor tissue.

[0792] The vaccine can additionally contain one or more auxiliary substances in order to increase its immunogenicity or immunostimulatory capacity, if desired. Particularly preferred are adjuvants as auxiliary substances or additives as defined for the pharmaceutical composition.

[0793] In a further aspect, the invention relates to a kit or kit of parts comprising the isRNA as described herein, at least one coding RNA as described herein, the combination as described comprising the isRNA and at least one coding RNA as described herein or comprising the pharmaceutical composition or vaccine as described herein, or the components thereof and optionally technical instructions with information on the administration and dosage of the components.

[0794] Besides the isRNA and/or at least one coding RNA, the kit may additionally contain a pharmaceutically acceptable vehicle, an adjuvant and at least one further component e.g. an additional pharmaceutically active component/compound as defined herein, as well as means for administration and technical instructions. The components of the composition, in particular the isRNA or the at least one coding RNA as described herein, and possibly further components may be provided in lyophilized form. In a preferred embodiment, prior to use of the kit, the provided vehicle is then added to the lyophilized components in a predetermined amount as written e.g. in the provided technical instructions.

[0795] In a particularly preferred embodiment, the kit may comprise the isRNA, preferably complexed by a polymeric carrier, as described herein in lyophilized form and the at least one coding RNA as described herein in lyophilized form and additionally a pharmaceutically acceptable vehicle, an adjuvant and at least one further component e.g. an additional pharmaceutically active component/compound as defined herein, as well as means for administration and technical instructions. Preferably, the kit comprises the isRNA, preferably complexed by a polymeric carrier, as described herein in lyophilized form and at least three, preferably at least four or five, coding RNAs encoding IL-12, CD40L, a decoy PD-1 receptor, preferably a soluble PD-1 receptor, an anti-CTLA4 antibody, and/or a tumor antigen as described herein, or a fragment or variant of any of these, in lyophilized form and a liquid for reconstitution, e.g. Ringer's Lactate solution or water.

[0796] The present invention furthermore several applications and uses of the isRNA as described herein, the at least one coding RNA as described herein, the combination thereof as described herein, or, respectively, the pharmaceutical composition, or the vaccine, or the kit or kit of parts as defined herein. As a main aspect of the invention, the isRNA as described herein, the at least one coding RNA as described herein, the combination thereof as described herein, or, respectively, the pharmaceutical composition or the kit or kit of parts may be used as a medicament, preferably for treatment or prophylaxis of a disease as described herein, more preferably for treatment of tumor or cancer diseases, most preferably for treatment of
[0797] melanoma, preferably advanced and/or metastatic melanoma, more preferably advanced cutaneous melanoma (cMEL);
[0798] squamous cell cancer (SCC) of the skin, preferably unresectable and/or advanced SCC of the skin, more preferably cutaneous squamous cell carcinoma (cSCC), even more preferably unresectable and/or advanced cSCC;
[0799] squamous cell carcinoma of the head and neck (HNSCC), preferably advanced HNSCC, more preferably immunotherapy-refractory or platinum-refractory HNSCC, even more preferably immunotherapy-refractory advanced HNSCC or platinum-refractory advanced HNSCC;
[0800] adenocystic carcinoma (ACC), preferably advanced ACC;
[0801] cutaneous T-cell lymphoma, preferably advanced cutaneous T-cell lymphoma or cutaneous T-cell lymphoma of mycosis fungoides subtype, more preferably cutaneous T-cell lymphoma refractory to local treatment or to chemotherapy, even more preferably advanced cutaneous T-cell lymphoma refractory to local treatment or to chemotherapy, or cutaneous T-cell lymphoma of mycosis fungoides subtype refractory to local treatment or to chemotherapy, and
[0802] vulvar cancer, preferably vulvar squamous cell cancer (VSCC), more preferably advanced VSCC, even more preferably VSCC refractory to surgery or chemotherapy, most preferably advanced VSCC refractory to surgery or chemotherapy; or
   for the treatment of a tumor or cancer disease selected from the group consisting of cutaneous melanoma (cMEL), cutaneous squamous cell carcinoma (cSCC), head and neck squamous cell carcinoma (HNSCC), adenoid cystic carcinoma (ACC), cutaneous T-cell lymphoma, preferably cutaneous T-cell lymphoma of mycosis fungoides subtype, and vulvar squamous cell cancer (VSCC), wherein the tumor or the cancer disease is preferably at an advanced stage and/or refractory to standard therapy.

[0803] The present invention thus provides the isRNA as described herein, the at least one coding RNA as described herein, the combination thereof as described herein, or, respectively, the pharmaceutical composition, or the vaccine, or the kit or kit of parts for use in the manufacture of a medicament. In this context, the treatment is preferably carried out by intratumoral application, especially by injection into tumor tissue. According to another aspect, the present invention is directed to the second medical use of the isRNA as described herein, the at least one coding RNA as described herein, the combination thereof as described herein, or, respectively, the pharmaceutical composition, or the vaccine, or the kit or kit of parts as described above, wherein these subject matters are used for preparation of a medicament particularly for intratumoral application (administration) for treatment of tumor or cancer diseases, preferably as described herein.

[0804] In one aspect, the present invention provides a method of treating or preventing a disorder, wherein the method comprises administering, preferably intratumorally, to a subject in need thereof an effective amount of a medicament as described herein, preferably of the isRNA as described herein, of the at least one coding RNA as described herein, of the combination thereof as described herein, or, respectively, of the pharmaceutical composition, or of the vaccine.

[0805] More preferably, the method is for treating or preventing a tumor or cancer disease as described herein, most preferably a disorder selected from the group consisting of
[0806] melanoma, preferably advanced and/or metastatic melanoma, more preferably advanced cutaneous melanoma (cMEL);
[0807] squamous cell cancer (SCC) of the skin, preferably unresectable and/or advanced SCC of the skin, more preferably cutaneous squamous cell carcinoma (cSCC), even more preferably unresectable and/or advanced cSCC;
[0808] squamous cell carcinoma of the head and neck (HNSCC), preferably advanced HNSCC, more preferably immunotherapy-refractory or platinum-refractory HNSCC, even more preferably immunotherapy-refractory advanced HNSCC or platinum-refractory advanced HNSCC;
[0809] adenocystic carcinoma (ACC), preferably advanced ACC;
[0810] cutaneous T-cell lymphoma, preferably advanced cutaneous T-cell lymphoma or cutaneous T-cell lymphoma of mycosis fungoides subtype, more preferably cutaneous T-cell lymphoma refractory to local treatment or to chemotherapy, even more preferably advanced cutaneous T-cell lymphoma refractory to local treatment or to chemotherapy, or cutaneous T-cell lymphoma of mycosis fungoides subtype refractory to local treatment or to chemotherapy, and
[0811] vulvar cancer, preferably vulvar squamous cell cancer (VSCC), more preferably advanced VSCC, even more preferably VSCC refractory to surgery or chemotherapy, most preferably advanced VSCC refractory to surgery or chemotherapy; or
   selected from the group consisting of cutaneous melanoma (cMEL), cutaneous squamous cell carcinoma (cSCC), head and neck squamous cell carcinoma (HNSCC), adenoid cystic carcinoma (ACC), cutaneous T-cell lymphoma, preferably cutaneous T-cell lymphoma of mycosis fungoides subtype, and vulvar squamous cell cancer (VSCC), wherein the disorder is preferably at an advanced stage and/or refractory to standard therapy.

[0812] The present invention thus provides the isRNA as described herein, the at least one coding RNA as described herein, the combination thereof as described herein, or, respectively, the pharmaceutical composition, or the vaccine, or the kit or kit of parts as defined herein as a medicament. Accordingly, the term “medicament” as used herein typically refers to the isRNA as described herein, the at least one coding RNA as described herein, the combination thereof as described herein (preferably formulated in order to allow administration, e.g. in a liquid formulation), or, respectively, the pharmaceutical composition, or the vaccine, or the kit or kit of parts as defined herein. In this context, it is preferred that the isRNA and/or the at least one coding RNA as described herein are provided in lyophilized form and are re-solubilized prior to administration, for instance by addition of a suitable vehicle as known in the art or as described herein, such as Ringer's Lactate solution or water.

[0813] The medicament as described herein may be administered by conventional needle injection or needle-free jet injection into the tumor tissue. In a preferred embodiment the medicament is administered by jet injection. Jet injection refers to a needle-free injection method, wherein a fluid comprising the composition and, optionally, further suitable excipients is forced through an orifice, thus generating an ultra-fine liquid stream of high pressure that is capable of penetrating mammalian skin. In principle, the liquid stream forms a hole in the skin, through which the liquid stream is pushed into the target tissue, namely the tumor tissue. According to the invention, jet injection may be used for intratumoral application of the medicament as described herein.

[0814] The medicament may be administered by conventional needle injection or needle-free jet injection adjacent to and/or in close proximity to the tumor tissue. In a preferred embodiment the medicament is administered by jet injection adjacent to and/or in close proximity to the tumor tissue. According to the invention, jet injection may be used for intratumoral application (adjacent to and/or in close proximity to the tumor tissue), particularly for injection of the medicament.

[0815] In some embodiments, the medicament may be administered orally, parenterally, by inhalation spray, topically, rectally, nasally, buccally, vaginally or via an implanted reservoir. The term parenteral as used herein includes subcutaneous, intravenous, intramuscular, intraarticular, intranodal, intrasynovial, intrasternal, intrathecal, intrahepatic, intralesional, intracranial, transdermal, intradermal, intrapulmonal, intraperitoneal, intracardial, intraarterial, and sublingual injection or infusion techniques. Further particularly preferred administration routes are intradermal and intramuscular injection. Preferably, the administration comprises an imaging technique, preferably as described herein. More preferably, the medicament is administered locoregionally, preferably as described herein. Even more preferably, the medicament is administered locoregionally, wherein the administration comprises an imaging technique, preferably as described herein.

[0816] According to a further embodiment, the treatment or prophylaxis of a disease, preferably of a tumor or cancer disease as described herein, comprises administration of at least one pharmaceutical composition comprising the isRNA as described herein and the administration of at least one further pharmaceutical composition comprising at least one coding RNA as described herein, wherein the pharmaceutical compositions may be administered via the same or via different routes. More preferably, the pharmaceutical compositions are administered via the same route, preferably intratumorally, e.g. by intratumoral or peritumoral injection.

[0817] According to a specific embodiment, the medicament may be administered to the patient as a single dose or as several doses. In certain embodiments, the medicament may be administered to a patient as a single dose followed by a second dose later and optionally even a third, fourth (or more) dose subsequent thereto etc.

[0818] Preferably, the medicament comprises at least 25 μg of isRNA and/or coding RNA per dose. Alternatively, a single dose of the medicament may comprise at least 15, 20, 25, 30, 35, 40, 45, 50, 55, 60, 65, 70, 75, 80, 85, 90, 95 or 100 μg of isRNA and/or coding RNA as described herein. More specifically, the amount of isRNA and/or coding RNA comprised in a single dose is typically at least 100 μg or 200 μg, preferably from 200 μg to 1.000 μg, more preferably from 300 μg to 850 μg, even more preferably from 300 μg to 700 μg. Where the medicament comprises more than one type of RNA, the values above preferably refer to the amounts of each single type of RNA.

[0819] According to a particularly preferred embodiment, the present invention provides an isRNA as described herein for use in the treatment of a tumor or cancer disease, preferably a disease selected from the group consisting of
[0820] melanoma, preferably advanced and/or metastatic melanoma, more preferably advanced cutaneous melanoma (cMEL);
[0821] squamous cell cancer (SCC) of the skin, preferably unresectable and/or advanced SCC of the skin, more preferably cutaneous squamous cell carcinoma (cSCC), even more preferably unresectable and/or advanced cSCC;
[0822] squamous cell carcinoma of the head and neck (HNSCC), preferably advanced HNSCC, more preferably immunotherapy-refractory or platinum-refractory HNSCC, even more preferably immunotherapy-refractory advanced HNSCC or platinum-refractory advanced HNSCC;
[0823] adenocystic carcinoma (ACC), preferably advanced ACC;
[0824] cutaneous T-cell lymphoma, preferably advanced cutaneous T-cell lymphoma or cutaneous T-cell lymphoma of mycosis fungoides subtype, more preferably cutaneous T-cell lymphoma refractory to local treatment or to chemotherapy, even more preferably advanced cutaneous T-cell lymphoma refractory to local treatment or to chemotherapy, or cutaneous T-cell lymphoma of mycosis fungoides subtype refractory to local treatment or to chemotherapy, and
[0825] vulvar cancer, preferably vulvar squamous cell cancer (VSCC), more preferably advanced VSCC, even more preferably VSCC refractory to surgery or chemotherapy, most preferably advanced VSCC refractory to surgery or chemotherapy; or
   selected from the group consisting of cutaneous melanoma (cMEL), cutaneous squamous cell carcinoma (cSCC), head and neck squamous cell carcinoma (HNSCC), adenoid cystic carcinoma (ACC), cutaneous T-cell lymphoma, preferably cutaneous T-cell lymphoma of mycosis fungoides subtype, and vulvar squamous cell cancer (VSCC), wherein the disease is preferably at an advanced stage and/or refractory to standard therapy.

[0826] Preferably, the treatment comprises administration, preferably intratumorally, of an isRNA as described herein, which is complexed by a cationic or polycationic compound. In a preferred embodiment, the isRNA comprises a nucleic acid sequence according to formula (I) (GₗXₘGₙ), formula (II) (CₗXₘCₙ), formula (III) (NᵤGₗXₘGₙNᵥ)ₐ or formula (IV) (NᵤCₗXₘCₙNᵥ)ₐ, preferably at least one nucleic acid sequence according to any one of SEQ ID NOs: 433 to 437, 1014 to 1016, 1055 or 1056, or a fragment or variant of any of these sequences, preferably according to any one of SEQ ID NOs: 433, 434 or 1014 to 1016, or a fragment or variant of any of these nucleic acid sequences, wherein the isRNA is complexed with a cationic or polycationic compound, preferably with a polymeric carrier, more preferably with a polymeric carrier that is formed by a disulfide-crosslinked cationic component, which preferably comprises a peptide according to formula (V), (Va) and/or (Vb) and/or a compound according to formula (VI), more preferably at least one of the disulfide-crosslinked cationic peptides Cys-Arg₁₂ or Cys-Arg₁₂-Cys. More preferably, the isRNA comprises a nucleic acid sequence according to SEQ ID NOs: 433 to 437, 1014 to 1016, or a fragment or variant of any of these sequences, preferably according to SEQ ID NO: 433, or a fragment or variant thereof, which is complexed with a cationic or polycationic compound as described herein, preferably with the disulfide-crosslinked peptide Cys-Arg₁₂-Cys. Most preferably, the isRNA in this consists of an RNA sequence according to SEQ ID NO: 433, or a fragment or variant thereof, which is complexed with the disulfide-crosslinked peptide Cys-Arg₁₂-Cys.

[0827] The treatment preferably comprises intratumoral administration of the isRNA as described above (or a pharmaceutical composition comprising said isRNA, respectively) to a subject suffering from a disease selected from the group consisting of
[0828] melanoma, preferably advanced and/or metastatic melanoma, more preferably advanced cutaneous melanoma (cMEL);
[0829] squamous cell cancer (SCC) of the skin, preferably unresectable and/or advanced SCC of the skin, more preferably cutaneous squamous cell carcinoma (cSCC), even more preferably unresectable and/or advanced cSCC;
[0830] squamous cell carcinoma of the head and neck (HNSCC), preferably advanced HNSCC, more preferably immunotherapy-refractory or platinum-refractory HNSCC, even more preferably immunotherapy-refractory advanced HNSCC or platinum-refractory advanced HNSCC;
[0831] adenocystic carcinoma (ACC), preferably advanced ACC;
[0832] cutaneous T-cell lymphoma, preferably advanced cutaneous T-cell lymphoma or cutaneous T-cell lymphoma of mycosis fungoides subtype, more preferably cutaneous T-cell lymphoma refractory to local treatment or to chemotherapy, even more preferably advanced cutaneous T-cell lymphoma refractory to local treatment or to chemotherapy, or cutaneous T-cell lymphoma of mycosis fungoides subtype refractory to local treatment or to chemotherapy, and
[0833] vulvar cancer, preferably vulvar squamous cell cancer (VSCC), more preferably advanced VSCC, even more preferably VSCC refractory to surgery or chemotherapy, most preferably advanced VSCC refractory to surgery or chemotherapy; or
   selected from the group consisting of cutaneous melanoma (cMEL), cutaneous squamous cell carcinoma (cSCC), head and neck squamous cell carcinoma (HNSCC), adenoid cystic carcinoma (ACC), cutaneous T-cell lymphoma, preferably cutaneous T-cell lymphoma of mycosis fungoides subtype, and vulvar squamous cell cancer (VSCC), wherein the disease is preferably at an advanced stage and/or refractory to standard therapy.

[0834] In a preferred embodiment, the subject receiving the treatment suffers from advanced and/or metastatic melanoma, unresectable and/or advanced SCC, unresectable and/or advanced adenocystic carcinoma (ACC), unresectable and/or advanced or cutaneous T-cell lymphoma or advanced and/or platinum-refractory HNSCC. Preferably, the subject has injectable tumor lesions. More preferably, the subject has no other treatment options.

[0835] More preferably, the treatment comprises intratumoral administration of the isRNA as described above (or a pharmaceutical composition comprising said isRNA, respectively) to a subject suffering from advanced melanoma, preferably advanced cutaneous melanoma, who is being treated with a checkpoint inhibitor, preferably as described herein. Most preferably, the subject is treated with a PD-1 or PD-L1 inhibitor, preferably as described herein, more preferably an antagonistic antibody against PD-1 or an antagonistic antibody against PD-L1.

[0836] The treatment preferably comprises intratumoral administration of a single dose of the isRNA as described above (or a pharmaceutical composition comprising said isRNA, respectively) to the subject, either once or repeatedly. In this context, a single dose preferably comprises from 20 μg to 500 μg, more preferably from 50 μg to 350 μg, of the isRNA as described above. In preferred embodiments, a single dose comprises at least 25 μg, 50 μg, 75 μg, 100 μg, 125 μg, 150 μg, 175 μg, 200 μg, 225 μg or at least 250 μg of the isRNA as described above. Most preferably, a single dose comprises about 25 μg, about 50 μg, about 100 μg or about 150 μg of the isRNA as described above.

[0837] The treatment may comprise repeated intratumoral administration to the subject of a single dose of the isRNA as described above (or a pharmaceutical composition comprising said isRNA, respectively), wherein at least 2, 3, 4, 5, 6, 7, 8, 9, 10, 11, 12 or more single doses are preferably administered to the subject and wherein the interval between the administration of two single doses is at least 1, 2, 3, 4, 5, 6, 7, 8, 9, 10, 11, 12, 13 or 14 days. The interval between the administration of two single doses may be constant or may be varied throughout the treatment. For example, the treatment may comprise intratumoral administration of a single dose once weekly for four weeks, followed by further single doses, preferably 3 to 8 further single doses, which are administered every two weeks.

[0838] According to another embodiment, the treatment comprises intratumoral administration of the isRNA as described above (or a pharmaceutical composition comprising said isRNA, respectively) to a subject suffering from a tumor or cancer disease, preferably selected from the group consisting of breast cancer (hormone receptor positive or negative forms); melanoma, preferably advanced and/or metastatic melanoma; squamous cell cancer of the skin (SCC), preferably unresectable and/or advanced SCC, or other forms of malignant skin cancer; adenocystic carcinoma (ACC), preferably advanced ACC; cutaneous T-cell lymphoma, preferably advanced cutaneous T-cell lymphoma; squamous cell carcinoma of the head and neck (HNSCC), preferably advanced HNSCC; salivary gland cancer; nasopharynx cancers; lung cancer or lung metastases of other malignancies; mesothelioma; bladder cancer; thyroid cancer; esophageal and gastric cancer; liver cancer; malignancies with liver metastases; ovarian cancer; cervix cancer; renal cancer; hematological malignancies with injectable lesions like cutaneous T-cell lymphoma; solitary or multiple myeloma; Hodgkin's disease; non-Hodgkin lymphoma with injectable lesions; sarcoma including its various subtypes; glioma grade I-IV; colorectal, rectal and anal cancer, more preferably selected from the group consisting of melanoma, preferably advanced and/or metastatic melanoma, most preferably advanced cutaneous melanoma (cMEL), squamous cell cancer of the skin (SCC), preferably unresectable and/or advanced SCC, most preferably cutaneous squamous cell carcinoma (cSCC), or other forms of malignant skin cancer, adenocystic carcinoma (ACC), preferably advanced ACC, cutaneous T-cell lymphoma, preferably advanced cutaneous T-cell lymphoma, and squamous cell carcinoma of the head and neck (HNSCC), preferably advanced HNSCC, wherein the treatment further comprises administration, preferably intratumorally, of at least one coding RNA as defined herein. In that embodiment, the treatment thus preferably comprises administration of the combination according to the present invention as described herein.

[0839] In that embodiment, the isRNA is preferably as described above and the at least one coding RNA is preferably an mRNA as described herein encoding at least one peptide or protein comprising IL-12, a decoy PD-1 receptor, preferably a soluble PD-1 receptor, CD40L, or an anti-CTLA4 antibody or a fragment or variant of any of these proteins as described herein.

[0840] More preferably, the treatment comprises intratumoral administration of the isRNA as described above (or a pharmaceutical composition comprising said isRNA, respectively) and further comprises administration, preferably intratumorally, of at least three, preferably at least four or five, coding RNAs as described herein, preferably at least three, more preferably at least four or five, mRNAs, wherein

a first coding RNA comprises a nucleic acid sequence selected from the group consisting of SEQ ID NOs: 285; 296; 307; 318; 329; 340; 351; 362; 373; 384; 395; 406; 430; 469 and 992, or a fragment or variant of any of these sequences,
a second coding RNA comprises a nucleic acid sequence selected from the group consisting of SEQ ID NOs: 286; 297; 308; 319; 330; 341; 352; 363; 374; 385; 396; 470 and 407, or a fragment or variant of any of these sequences,
a third coding RNA comprises a nucleic acid sequence selected from the group consisting of SEQ ID NOs: 926-940, or a fragment or variant of any of these sequences,
a fourth coding RNA comprises a nucleic acid sequence selected from the group consisting of SEQ ID NOs: 956-970, or a fragment or variant of any of these sequences, and/or
optionally, a fifth coding RNA comprises a nucleic acid sequence selected from the group consisting of SEQ ID NOs: 277; 288; 299; 310; 321; 332; 343; 354; 365; 376; 387; 461 and 398, or a fragment or variant of any of these sequences. Therein, the first, second, third, fourth and fifth coding RNAs are preferably formulated separately and administered concomitantly.

[0841] Even more preferably, the treatment comprises intratumoral administration of the isRNA as described above (or a pharmaceutical composition comprising said isRNA, respectively) and further comprises administration, preferably intratumorally, of at least three, preferably of at least four or five, coding RNAs as described herein, preferably at least three, more preferably at least four or five, mRNAs, wherein

a first coding RNA comprises a nucleic acid sequence selected from the group consisting of SEQ ID NOs: 285; 296; 307; 318; 329; 340; 351; 362; 373; 384; 395; 406; 430; 469 and 992, or a fragment or variant of any of these sequences,
a second coding RNA comprises a nucleic acid sequence selected from the group consisting of SEQ ID NOs: 286; 297; 308; 319; 330; 341; 352; 363; 374; 385; 396; 470 and 407, or a fragment or variant of any of these sequences,
a third coding RNA comprises a nucleic acid sequence selected from the group consisting of SEQ ID NOs: 926-940, or a fragment or variant of any of these sequences,
a fourth coding RNA comprises a nucleic acid sequence selected from the group consisting of SEQ ID NOs: 956-970, or a fragment or variant of any of these sequences, and/or
optionally, a fifth coding RNA comprises a nucleic acid sequence selected from the group consisting of SEQ ID NOs: 277; 288; 299; 310; 321; 332; 343; 354; 365; 376; 387; 461 and 398, or a fragment or variant of any of these sequences. Therein, the first, second, third, fourth and fifth coding RNAs are preferably formulated separately and administered concomitantly.

[0842] Most preferably, the treatment comprises intratumoral administration of the isRNA as described above (or a pharmaceutical composition comprising said isRNA, respectively) and further comprises administration, preferably intratumorally, of at least three, preferably at least four or five, coding RNAs as described herein, preferably at least three, more preferably at least four of five, mRNAs, wherein

a first coding RNA comprises a nucleic acid sequence selected from the group consisting of SEQ ID NOs: 285; 296; 307; 318; 329; 340; 351; 362; 373; 384; 395; 406; 430; 469 and 992, or a fragment or variant of any of these sequences,
a second coding RNA comprises a nucleic acid sequence selected from the group consisting of SEQ ID NOs: 286; 297; 308; 319; 330; 341; 352; 363; 374; 385; 396; 470 and 407, or a fragment or variant of any of these sequences, a third coding RNA comprises a nucleic acid sequence selected from the group consisting of SEQ ID NOs: 926-940, or a fragment or variant of any of these sequences,
a fourth coding RNA comprises a nucleic acid sequence selected from the group consisting of SEQ ID NOs: 956-970, or a fragment or variant of any of these sequences, and/or
optionally, a fifth coding RNA comprises a nucleic acid sequence selected from the group consisting of SEQ ID NOs: 277; 288; 299; 310; 321; 332; 343; 354; 365; 376; 387; 461 and 398, or a fragment or variant of any of these sequences. Therein, the first, second, third, fourth and fifth coding RNAs are preferably formulated separately and administered concomitantly.

[0843] Hence, the treatment preferably comprises

intratumoral administration of an isRNA comprising a nucleic acid sequence according to SEQ ID NOs: 433 to 437, 1014 to 1016 or a fragment or variant of any of these sequences, preferably according to SEQ ID NO: 433 or a fragment or variant thereof, which is complexed with a cationic or polycationic compound as described herein, preferably with the disulfide-crosslinked peptide Cys-Arg₁₂-Cys, and
intratumoral, peritumoral or locoregional administration of at least five coding RNAs, preferably an mRNA, wherein
a first coding RNA comprises a nucleic acid sequence selected from the group consisting of SEQ ID NOs: 296; 307; 318; 329; 340; 351; 362; 373; 384; 395; 406; 430 and 992, or a fragment or variant of any of these sequences,
a second coding RNA comprises a nucleic acid sequence selected from the group consisting of SEQ ID NOs: 297; 308; 319; 330; 341; 352; 363; 374; 385; 396 and 407, or a fragment or variant of any of these sequences,
a third coding RNA comprises a nucleic acid sequence selected from the group consisting of SEQ ID NOs: 926-940, or a fragment or variant of any of these sequences,
a fourth coding RNA comprises a nucleic acid sequence selected from the group consisting of SEQ ID NOs: 956-970, or a fragment or variant of any of these sequences, and/or
optionally, a fifth coding RNA comprises a nucleic acid sequence selected from the group consisting of SEQ ID NOs: 288; 299; 310; 321; 332; 343; 354; 365; 376; 387 and 398, or a fragment or variant of any of these sequences,
wherein the first, second, third, fourth and fifth coding RNAs are preferably formulated separately and administered concomitantly.

[0844] According to an alternative embodiment, the treatment comprises

intratumoral administration of an isRNA comprising a nucleic acid sequence according to SEQ ID NOs: 433 to 437, 1014 to 1016, 10555 or 1056 or a fragment or variant of any of these sequences, preferably according to SEQ ID NO: 433 or a fragment or variant thereof, which is complexed with a cationic or polycationic compound as described herein, preferably with the disulfide-crosslinked peptide Cys-Arg₁₂-Cys, and
intratumoral, peritumoral or locoregional administration of at least five coding RNAs, preferably an mRNA, wherein
a first coding RNA comprises a nucleic acid sequence selected from the group consisting of SEQ ID NOs: 285; 296; 307; 318; 329; 340; 351; 362; 373; 384; 395; 406; 430; 469 and 992, or a fragment or variant of any of these sequences,
a second coding RNA comprises a nucleic acid sequence selected from the group consisting of SEQ ID NOs: 286; 297; 308; 319; 330; 341; 352; 363; 374; 385; 396; 470 and 407, or a fragment or variant of any of these sequences,
a third coding RNA comprises a nucleic acid sequence selected from the group consisting of SEQ ID NOs: 926-940, or a fragment or variant of any of these sequences,
a fourth coding RNA comprises a nucleic acid sequence selected from the group consisting of SEQ ID NOs: 956-970, or a fragment or variant of any of these sequences, and/or
optionally, a fifth coding RNA comprises a nucleic acid sequence selected from the group consisting of SEQ ID NOs: 277; 288; 299; 310; 321; 332; 343; 354; 365; 376; 387; 461 and 398, or a fragment or variant of any of these sequences,
wherein the first, second, third, fourth and fifth coding RNAs are preferably formulated separately and administered concomitantly.

[0845] Most preferably, the treatment preferably comprises

Intratumoral, peritumoral or locoregional administration of an isRNA comprising a nucleic acid sequence according to SEQ ID NO: 433 to 437, 1014 to 1016, 1055 or 1056, or a fragment or variant of any of these sequences, preferably according to SEQ ID NO: 433 or a fragment or variant thereof, which is complexed with a cationic or polycationic compound as described herein, preferably with the disulfide-crosslinked peptide Cys-Arg₁₂-Cys, and
intratumoral, peritumoral or locoregional administration of at least five coding RNAs, preferably an mRNA, wherein
a first coding RNA comprises a nucleic acid sequence selected from the group consisting of SEQ ID NOs: 296; 307; 318; 329; 340; 351; 362; 373; 384; 395; 406; 430 and 992, or a fragment or variant of any of these sequences,
a second coding RNA comprises a nucleic acid sequence selected from the group consisting of SEQ ID NOs: 297; 308; 319; 330; 341; 352; 363; 374; 385; 396 and 407, or a fragment or variant of any of these sequences,
a third coding RNA comprises a nucleic acid sequence selected from the group consisting of SEQ ID NOs: 926-940, or a fragment or variant of any of these sequences,
a fourth coding RNA comprises a nucleic acid sequence selected from the group consisting of SEQ ID NOs: 956-970, or a fragment or variant of any of these sequences, and/or
optionally, a fifth coding RNA comprises a nucleic acid sequence selected from the group consisting of SEQ ID NOs: 288; 299; 310; 321; 332; 343; 354; 365; 376; 387 and 398, or a fragment or variant of any of these sequences,
wherein the first, second, third, fourth and fifth coding RNAs are preferably formulated separately and administered concomitantly.

[0846] In that embodiment, the isRNA, the dosage regimen of the isRNA and the administration of the isRNA are preferably as described above with respect to the isRNA for use in the treatment of a tumor or cancer disease.

[0847] The dosage regimen and the administration of the at least one coding RNA, which is administered concomitantly with the isRNA as described above, is preferably identical to the dosage regimen and the administration as described above with respect to the isRNA for use in the treatment of a tumor or cancer disease. The treatment thus preferably comprises intratumoral administration of a single dose of the at least one coding RNA as described herein (or a pharmaceutical composition comprising said RNA, respectively) to the subject, either once or repeatedly. In this context, a single dose preferably comprises from 20 μg to 500 μg, more preferably from 50 μg to 350 μg, of the at least one coding RNA as described above. In preferred embodiments, a single dose comprises at least 25 μg, 50 μg, 75 μg, 100 μg, 125 μg, 150 μg, 175 μg, 200 μg, 225 μg or at least 250 μg of the at least one coding RNA as described above. Most preferably, a single dose comprises about 25 μg, about 50 μg, about 100 μg or about 150 μg of the at least one coding RNA as described herein. More preferably, the treatment comprises administration of at least three coding RNAs as described above, wherein a single dose comprises the above indicated amounts of each of the coding RNAs. The treatment preferably comprises repeated administration of a single dose as described above. Preferably, the doses of the at least one coding RNA are administered concomitantly with the isRNA as described above and preferably following the schedule described in that context.

[0848] In a particularly preferred embodiment the subject receiving the isRNA, the at least one coding RNA, the combination thereof or the pharmaceutical composition or vaccine comprising said RNA(s) may be a patient with cancer or tumor who receives or received standard treatments of cancer. Preferably, the patient has achieved partial response or stable disease after having received standard treatments.

[0849] The standard treatments of cancer include chemotherapy, radiation, chemoradiation and surgery dependent on the particular cancer or tumor type to be treated, wherein these treatments are applied individually or in combination.

[0850] In some embodiments, the subject receiving the isRNA, the at least one coding RNA, the combination thereof or the pharmaceutical composition or vaccine comprising said RNA(s) may be a patient with a tumor or cancer disease, preferably as defined herein, more preferably a disease selected from the group consisting of melanoma, preferably advanced and/or metastatic melanoma, most preferably advanced cutaneous melanoma (cMEL), squamous cell cancer of the skin (SCC), preferably unresectable and/or advanced SCC, most preferably cutaneous squamous cell carcinoma (cSCC), or other forms of malignant skin cancer, adenocystic carcinoma (ACC), preferably advanced ACC, cutaneous T-cell lymphoma, preferably advanced cutaneous T-cell lymphoma, and squamous cell carcinoma of the head and neck (HNSCC), preferably advanced HNSCC, who received or receives chemotherapy (e.g. first-line or second-line chemotherapy), radiotherapy, chemoradiation (combination of chemotherapy and radiotherapy), kinase inhibitors, antibody therapy and/or checkpoint modulators (e.g. CTLA4 inhibitors, PD1 pathway inhibitors), or a patient, who has achieved partial response or stable disease after having received one or more of the treatments specified above.

[0851] According to certain embodiments, the subject receiving the isRNA, the at least one coding RNA, the combination thereof or the pharmaceutical composition or vaccine comprising said RNA(s) may be a subject suffering from a disease selected from the group consisting of melanoma, preferably advanced and/or metastatic melanoma, most preferably advanced cutaneous melanoma (cMEL), squamous cell cancer of the skin (SCC), preferably unresectable and/or advanced SCC, most preferably cutaneous squamous cell carcinoma (cSCC), or other forms of malignant skin cancer, adenocystic carcinoma (ACC), preferably advanced ACC, cutaneous T-cell lymphoma, preferably advanced cutaneous T-cell lymphoma, and squamous cell carcinoma of the head and neck (HNSCC), preferably advanced HNSCC, who received or receives, preferably via intratumoral administration, a compound conventionally used in any of these diseases as described herein.

[0852] More preferably, the subject receiving the isRNA, the at least one coding RNA, the combination thereof or the pharmaceutical composition or vaccine comprising said RNA(s) suffers from a disease selected from the group consisting of melanoma, preferably advanced and/or metastatic melanoma, most preferably advanced cutaneous melanoma (cMEL), squamous cell cancer of the skin (SCC), preferably unresectable and/or advanced SCC, most preferably cutaneous squamous cell carcinoma (cSCC), or other forms of malignant skin cancer, adenocystic carcinoma (ACC), preferably advanced ACC, cutaneous T-cell lymphoma, preferably advanced cutaneous T-cell lymphoma, and squamous cell carcinoma of the head and neck (HNSCC), preferably advanced HNSCC, and received or received a checkpoint modulator.

[0853] According to some embodiments, the subject receiving the isRNA, the at least one coding RNA, the combination thereof or the pharmaceutical composition or vaccine comprising said RNA(s) may be a patient with a tumor or cancer disease selected from
[0854] melanoma, preferably advanced and/or metastatic melanoma, more preferably advanced cutaneous melanoma (cMEL);
[0855] squamous cell cancer (SCC) of the skin, preferably unresectable and/or advanced SCC of the skin, more preferably cutaneous squamous cell carcinoma (cSCC), even more preferably unresectable and/or advanced cSCC;
[0856] squamous cell carcinoma of the head and neck (HNSCC), preferably advanced HNSCC, more preferably immunotherapy-refractory or platinum-refractory HNSCC, even more preferably immunotherapy-refractory advanced HNSCC or platinum-refractory advanced HNSCC;
[0857] adenocystic carcinoma (ACC), preferably advanced ACC;
[0858] cutaneous T-cell lymphoma, preferably advanced cutaneous T-cell lymphoma or cutaneous T-cell lymphoma of mycosis fungoides subtype, more preferably cutaneous T-cell lymphoma refractory to local treatment or to chemotherapy, even more preferably advanced cutaneous T-cell lymphoma refractory to local treatment or to chemotherapy, or cutaneous T-cell lymphoma of mycosis fungoides subtype refractory to local treatment or to chemotherapy, and
[0859] vulvar cancer, preferably vulvar squamous cell cancer (VSCC), more preferably advanced VSCC, even more preferably VSCC refractory to surgery or chemotherapy, most preferably advanced VSCC refractory to surgery or chemotherapy; or
   selected from cutaneous melanoma (cMEL), cutaneous squamous cell carcinoma (cSCC), head and neck squamous cell carcinoma (HNSCC), adenoid cystic carcinoma (ACC), cutaneous T-cell lymphoma, preferably cutaneous T-cell lymphoma of mycosis fungoides subtype, and vulvar squamous cell cancer (VSCC),
   wherein the tumor or the cancer disease is preferably at an advanced stage and/or refractory to standard therapy.

[0860] More preferably, the subject receiving the isRNA, the at least one coding RNA, the combination thereof or the pharmaceutical composition or vaccine comprising said RNA(s) is a patient suffering from a tumor or cancer disease as described herein and who received or receives chemotherapy (e.g. first-line or second-line chemotherapy), radiotherapy, chemoradiation (combination of chemotherapy and radiotherapy), kinase inhibitors, antibody therapy and/or checkpoint modulators (e.g. CTLA4 inhibitors, PD1 pathway inhibitors), or a patient, who has achieved partial response or stable disease after having received one or more of the treatments specified above. More preferably, the subject is a patient suffering from a tumor or cancer disease as described herein and who received or receives, preferably via intratumoral administration, a compound conventionally used in any of these diseases as described herein, more preferably a patient who receives or received, preferably via intratumoral administration, a checkpoint modulator.

[0861] The subject receiving the isRNA, the at least one coding RNA, the combination thereof or the pharmaceutical composition or vaccine comprising said RNA(s) preferably suffers from melanoma, preferably advanced and/or metastatic melanoma, and received or received, preferably via intratumoral administration, at least one of the following treatments:
[0862] checkpoint modulator monotherapy, such as Pembrolizumab, Nivolumab or Ipilimumab;
[0863] checkpoint modulator combination therapy, such as Nivolumab and Ipilimumab;
[0864] combination therapy comprising Dabrafenib and Trametinib, or Vemurafenib and cobimetinib or single agent therapy using Vemurafenib or Dabrafenib;
[0865] high-dose IL-2 treatment;
[0866] Imatinib;
[0867] cytotoxic treatments using compounds such as Dacarbazine, Temozolomide, Paclitaxel, Albumin-bound paclitaxel, Carboplatin/paclitaxel;
[0868] biochemotherapy using compounds such as Decarbazine and/or temozolomide and/or carboplatin with/without vinblastine and/or nitrosourea and/or IL-2 and/or interferon alfa2b.

[0869] The subject receiving the isRNA, the at least one coding RNA, the combination thereof or the pharmaceutical composition or vaccine comprising said RNA(s) preferably suffers from squamous cell carcinoma of the head and neck (HNSCC), preferably advanced HNSCC, and received or received, preferably via intratumoral administration, at least one of the following treatments:
[0870] treatments using single agents, e.g. Cisplatin, Carboplatin, Paclitaxel, Docetaxel, 5-FU, Methotrexate, Cetuximab, Gemcitabine, Capecitabine, Vinorelbine, Afatinib;
[0871] treatments using a combination of agents; such as
   Carboplatin and infusional 5-FU;
   5-FU and hydroxyurea;
   Cisplatin and paclitaxel;
   Cisplatin and infusional 5-FU;

### Cisplatin and 5-FU;

[0872] Carboplatin and paclitaxel;
Cisplatin followed by cisplatin and 5-FU;
Docetaxel and cisplatin and 5-FU;
Paclitaxel and cisplatin and infusional 5-FU;
Docetaxel and cisplatin;
Cisplatin and epirubicin and paclitaxel;
Cisplatin or carboplatin and 5-FU and cetuximab;
Cisplatin or carboplatin and docetaxel or paclitaxel;

### Cisplatin and Cetuximab;

[0873] Cisplatin and decetaxel and cetuximab;
Cisplatin and paclitaxel cetuximab;
Carboplatin and cetuximab;
Cisplatin and gemcitabine;
Gemcitabine and vinorelbine.

[0874] The subject receiving the isRNA, the at least one coding RNA, the combination thereof or the pharmaceutical composition or vaccine comprising said RNA(s) preferably suffers from squamous cell cancer of the skin (SCC), preferably unresectable and/or advanced SCC, and received or received, preferably via intratumoral administration, at least one of the following treatments:
[0875] 5-FU;
[0876] Cisplatin;
[0877] Cisplatin and 5-FU;
[0878] Interferon alpha;
[0879] Cis-retinoic acid;
[0880] Interferon alpha and Cis-retinoic acid and Cisplatin;
[0881] Cetuximab;
[0882] vismodegib;
[0883] Cisplatin and 5-FU and Cetuximab;
[0884] Imiquimod;
[0885] Photodynamic therapy (amino levulinic acid, porfimer sodium);
[0886] Vigorous crytotherapy;
[0887] Electrodesiccation;
[0888] Diclofenac;
[0889] Chemical peel (trichloroacetic acid);
[0890] Cryotherapy and 5-FU and Imiquimod;
[0891] Retinoids (acitretin, isotretinoin);
[0892] Calcineurin inhibitors and/or mTOR inhibitors (rapamycin, temsirolimus, Sirolimus, everolimus, ridaforolimus, Deforolimus);
[0893] cisplatin and/or carboplatin and/or 5-FU and/or Paclitaxel and/or Decetaxel.

[0894] The subject receiving the isRNA, the at least one coding RNA, the combination thereof or the pharmaceutical composition or vaccine comprising said RNA(s) preferably suffers from adenocystic carcinoma (ACC), preferably advanced ACC, and received or received, preferably via intratumoral administration, at least one of the following treatments: treatments using as single agents or in combination
[0895] radiotherapy;
[0896] Cisplatin;
[0897] Paclitaxel;
[0898] Mitoxantron;
[0899] Doxo-/Epirubicin;
[0900] Metothrexate;
[0901] Vinorelbine;
[0902] External-beam radiation therapy.

[0903] The subject receiving the isRNA, the at least one coding RNA, the combination thereof or the pharmaceutical composition or vaccine comprising said RNA(s) preferably suffers from cutaneous T-cell lymphoma, preferably advanced cutaneous T-cell lymphoma or mycosis fungoides subtype T cell lymphoma, and received or received, preferably via intratumoral administration, at least one of the following treatments, treatments using as single agents or in combination
[0904] Corticosteroids;
[0905] Carmustine;
[0906] Nitrogen mustard (mechlorethamine hydrochloride);
[0907] Bexarotene;
[0908] Taxarotene gel;
[0909] Imiquimod;
[0910] phototherapy;
[0911] electron beam therapy (TSEBT);
[0912] Alemtuzumab;
[0913] Retinoids;
[0914] Interferon;
[0915] Vorinostat;
[0916] Romidepsin;
[0917] extracorporeak photopheresis (ECP);
[0918] Methotrexate;
[0919] liposomal doxorubicin;
[0920] Gemcitabine;
[0921] Pentostatin;
[0922] Temozolomide;
[0923] Pralatrexate;
[0924] allogenic cell transplant.

[0925] The subject receiving the isRNA, the at least one coding RNA, the combination thereof or the pharmaceutical composition or vaccine comprising said RNA(s) preferably suffers from vulvar cancer, preferably vulvar squamous cell cancer (VSCC), more preferably advanced VSCC, even more preferably VSCC refractory to surgery or chemotherapy, most preferably advanced VSCC refractory to surgery or chemotherapy, and received or received, preferably via intratumoral administration, at least one of the following treatments, treatments using as single agents or in combination:
[0926] mitomycin-C2;
[0927] cisplatin;
[0928] carboplatin;
[0929] vinorelbine;
[0930] paclitaxel;
[0931] a tyrosine kinase inhibitor (e.g. erlotinib);
[0932] nivolumab;
[0933] bleomycin sulfate (e.g. bleomycin, bleomycin sulfate, blenamax, tevableo, oncobleo, bleo, bloicin-S);
[0934] 5-fluorouracil (5-FU);
[0935] Gardasil 9 (human papillomavirus (9-valent) vaccine);
[0936] omiganan pentahydrochloride;
[0937] alisertib;
[0938] ISA-101 (13 synthetic long peptides (25-35 amino acids long) derived from the E6 and E7 oncogenic proteins of the HPV 16 virus);
[0939] PDS-0101;
[0940] Vicoryx (P16_37-63 vaccine);
[0941] TA-CIN (fusion protein vaccine comprising capsid protein L2, E6 and E7 from HPV16); and
[0942] human papillomavirus 16 E6 peptide vaccine.

[0943] The present invention and preferred embodiments thereof are further described by the following items:
[0944] 1. Immunostimulatory RNA (isRNA) for use in the treatment or prophylaxis of a tumor or cancer disease preferably selected from the group consisting of cutaneous melanoma (cMEL), cutaneous squamous cell carcinoma (cSCC), head and neck squamous cell carcinoma (HNSCC), adenoid cystic carcinoma (ACC), cutaneous T-cell lymphoma, preferably cutaneous T-cell lymphoma of mycosis fungoides subtype, and vulvar squamous cell cancer (VSCC), wherein the tumor or the cancer disease is preferably at an advanced stage and/or refractory to standard therapy.
[0945] 2. The isRNA for use according to item 1, wherein the isRNA is administered intratumorally, including peritumorally or locoregionally.
[0946] 3. The isRNA for use according to item 2, wherein the isRNA is administered by injection.
[0947] 4. The isRNA for use according to any of the preceding items, wherein the isRNA is a non-coding RNA.
[0948] 5. The isRNA for use according to any of the preceding items, wherein the isRNA comprises
   [0949] a nucleic acid sequence according to

(GₗXₘGₙ), formula (I)
[0950] wherein:
[0951] G is guanosine (guanine), uridine (uracil) or an analogue of guanosine (guanine) or uridine (uracil);
[0952] X is guanosine (guanine), (uridine) uracil, adenosine (adenine), thymidine (thymine), cytidine (cytosine) or an analogue of the above-mentioned nucleotides (nucleosides);
[0953] l is an integer from 1 to 40,
[0954] wherein
[0955] when l=1 G is guanosine (guanine) or an analogue thereof,
[0956] when l>1 at least 50% of the nucleotides (nucleosides) are guanosine (guanine) or an analogue thereof;
[0957] m is an integer and is at least 3;
[0958] wherein
[0959] when m=3 X is uridine (uracil) or an analogue thereof,
[0960] when m>3 at least 3 successive uridines (uracils) or analogues of uridine (uracil) occur;
[0961] n is an integer from 1 to 40,
[0962] wherein
[0963] when n=1 G is guanosine (guanine) or an analogue thereof,
[0964] when n>1 at least 50% of the nucleotides (nucleosides) are guanosine (guanine) or an analogue thereof;
[0965] a nucleic acid sequence according to

(C_{G}XₘCₙ) formula (II)
[0966] wherein:
[0967] C is cytidine (cytosine), uridine (uracil) or an analogue of cytidine (cytosine) or uridine (uracil);
[0968] X is guanosine (guanine), uridine (uracil), adenosine (adenine), thymidine (thymine), cytidine (cytosine) or an analogue of the above-mentioned nucleotides (nucleosides);
[0969] l is an integer from 1 to 40,
[0970] wherein
[0971] when l=1 C is cytidine (cytosine) or an analogue thereof,
[0972] when l>1 at least 50% of the nucleotides (nucleosides) are cytidine (cytosine) or an analogue thereof;
[0973] m is an integer and is at least 3;
[0974] wherein
[0975] when m=3 X is uridine (uracil) or an analogue thereof,
[0976] when m>3 at least 3 successive uridines (uracils) or analogues of uridine (uracil) occur;
[0977] n is an integer from 1 to 40,
[0978] wherein
[0979] when n=1 C is cytidine (cytosine) or an analogue thereof,
[0980] when n>1 at least 50% of the nucleotides (nucleosides) are cytidine (cytosine) or an analogue thereof;
[0981] a nucleic acid sequence according to

(NᵤGₗXₘGₙNᵥ)ₐ formula (III)
[0982] wherein:
[0983] G is guanosine (guanine), uridine (uracil) or an analogue of guanosine (guanine) or uridine (uracil), preferably guanosine (guanine) or an analogue thereof;
[0984] X is guanosine (guanine), uridine (uracil), adenosine (adenine), thymidine (thymine), cytidine (cytosine), or an analogue of these nucleotides (nucleosides), preferably uridine (uracil) or an analogue thereof;
[0985] N is a nucleic acid sequence having a length of about 4 to 50, preferably of about 4 to 40, more preferably of about 4 to 30 or 4 to 20 nucleic acids, each N independently being selected from guanosine (guanine), uridine (uracil), adenosine (adenine), thymidine (thymine), cytidine (cytosine) or an analogue of these nucleotides (nucleosides);
[0986] a is an integer from 1 to 20, preferably from 1 to 15, most preferably from 1 to 10;
[0987] l is an integer from 1 to 40,
[0988] wherein when l=1, G is guanosine (guanine) or an analogue thereof,
[0989] when l>1, at least 50% of these nucleotides (nucleosides) are guanosine (guanine) or an analogue thereof;
[0990] m is an integer and is at least 3;
[0991] wherein when m=3, X is uridine (uracil) or an analogue thereof, and
[0992] when m>3, at least 3 successive uridines (uracils) or analogues of uridine (uracil) occur;
[0993] n is an integer from 1 to 40,
[0994] wherein when n=1, G is guanosine (guanine) or an analogue thereof,
[0995] when n>1, at least 50% of these nucleotides (nucleosides) are guanosine (guanine) or an analogue thereof;
[0996] u,v may be independently from each other an integer from 0 to 50,
[0997] preferably wherein when u=0, v≥1, or when v=0, u≥1;
[0998] wherein the nucleic acid molecule of formula (III) has a length of at least 50 nucleotides, preferably of at least 100 nucleotides, more preferably of at least 150 nucleotides, even more preferably of at least 200 nucleotides and most preferably of at least 250 nucleotides; and/or
[0999] a nucleic acid sequence according to

(NᵤCₗXₘCₙNᵥ)ₐ formula (IV)
[1000] wherein:
[1001] C is cytidine (cytosine), uridine (uracil) or an analogue of cytidine (cytosine) or uridine (uracil), preferably cytidine (cytosine) or an analogue thereof;
[1002] X is guanosine (guanine), uridine (uracil), adenosine (adenine), thymidine (thymine), cytidine (cytosine) or an analogue of the above-mentioned nucleotides (nucleosides), preferably uridine (uracil) or an analogue thereof;
[1003] N is each a nucleic acid sequence having independent from each other a length of about 4 to 50, preferably of about 4 to 40, more preferably of about 4 to 30 or 4 to 20 nucleic acids, each N independently being selected from guanosine (guanine), uridine (uracil), adenosine (adenine), thymidine (thymine), cytidine (cytosine) or an analogue of these nucleotides (nucleosides);
[1004] a is an integer from 1 to 20, preferably from 1 to 15, most preferably from 1 to 10;
[1005] l is an integer from 1 to 40,
[1006] wherein when l=1, C is cytidine (cytosine) or an analogue thereof,
[1007] when l>1, at least 50% of these nucleotides (nucleosides) are cytidine (cytosine) or an analogue thereof;
[1008] m is an integer and is at least 3;
[1009] wherein when m=3, X is uridine (uracil) or an analogue thereof,
[1010] when m>3, at least 3 successive uridines (uracils) or analogues of uridine (uracil) occur;
[1011] n is an integer from 1 to 40,
[1012] wherein when n=1, C is cytidine (cytosine) or an analogue thereof,
[1013] when n>1, at least 50% of these nucleotides (nucleosides) are cytidine (cytosine) or an analogue thereof.
[1014] u, v may be independently from each other an integer from 0 to 50,
[1015] preferably wherein when u=0, v≥1, or when v=0, u≥1;
[1016] wherein the nucleic acid molecule of formula (V) according to the invention has a length of at least 50 nucleotides, preferably of at least 100 nucleotides, more preferably of at least 150 nucleotides, even more preferably of at least 200 nucleotides and most preferably of at least 250 nucleotides.
[1017] 6. The isRNA for use according to any of the preceding items, wherein the isRNA comprises at least one nucleic acid sequence according to any one of SEQ ID NOs: 433 to 437 or 1014 to 1016, preferably according to any one of SEQ ID NO: 433, 434 or 1014 to 1016, or a fragment or variant of any one of these nucleic acid sequences.
[1018] 7. The isRNA for use according to any of the preceding items, wherein the isRNA is complexed with a cationic or polycationic compound, preferably with a cationic or polycationic polymer, a cationic or polycationic peptide or protein, e.g. protamine, a cationic or polycationic polysaccharide and/or a cationic or polycationic lipid.
[1019] 8. The isRNA for use according to item 7, wherein the cationic or polycationic compound is a polymeric carrier.
[1020] 9. The isRNA for use according to item 8, wherein the polymeric carrier is formed by a disulfide-crosslinked cationic component, preferably a disulfide-crosslinked cationic peptide, wherein the disulfide-crosslinked cationic peptide preferably comprises
   [1021] a peptide according to formula V

(Arg)ₗ; (Lys)ₘ; (His)ₙ; (Orn)ₒ; (Xaa)ₓ, (formula (V),
[1022] wherein l+m+n+o+x=8-15, and l, m, n or o independently of each other may be any number selected from 0, 1, 2, 3, 4, 5, 6, 7, 8, 9, 10, 11, 12, 13, 14 or 15, provided that the overall content of Arg, Lys, His and Orn represents at least 50% of all amino acids of the oligopeptide; and Xaa may be any amino acid selected from native (=naturally occurring) or non-native amino acids except of Arg, Lys, His or Orn; and x may be any number selected from 0, 1, 2, 3 or 4, provided, that the overall content of Xaa does not exceed 50% of all amino acids of the oligopeptide;
[1023] a peptide according to formula Va

{(Arg)ₗ;(Lys)ₘ;(His)ₙ;(Orn)ₒ;(Xaa′)ₓ(Cys)_{y}} formula (Va),
[1024] wherein (Arg)ₗ; (Lys)ₘ; (His)ₙ; (Orn)ₒ; and x are as defined for formula V, Xaa′ is any amino acid selected from native (=naturally occurring) or non-native amino acids except of Arg, Lys, His, Orn or Cys and y is any number selected from 0, 1, 2, 3, 4, 5, 6, 7, 8, 9, 10, 11, 12, 13, 14, 15, 16, 17, 18, 19, 20, 21-30, 31-40, 41-50, 51-60, 61-70, 71-80 and 81-90, provided that the overall content of Arg (Arginine), Lys (Lysine), His (Histidine) and Orn (Ornithine) represents at least 10% of all amino acids of the oligopeptide;
[1025] a peptide according to formula Vb

Cys1{(Arg)ₗ;(Lys)ₘ;(His)ₙ;(Orn)ₒ;(Xaa)ₓ}Cys2 formula (Vb)
[1026] wherein empirical formula {(Arg)ₗ; (Lys)ₘ; (His)ₙ; (Orn)ₒ; (Xaa)ₓ} is as defined for formula (V) and forms a core of an amino acid sequence according to (semiempirical) formula (V) and wherein Cys1 and Cys2 are cysteines proximal to, or terminal to (Arg)ₗ; (Lys)ₘ; (His)ₙ; (Orn)ₒ; (Xaa)ₓ; and/or
[1027] a compound according to formula VI

L-P¹-S—[S-P²-S]ₙ—S-P³-L formula (VI)
[1028] wherein,
   [1029] P¹ and P³ are different or identical to each other and represent a linear or branched hydrophilic polymer chain, each P¹ and P³ exhibiting at least one —SH-moiety, capable to form a disulfide linkage upon condensation with component P², or alternatively with (AA), (AA)ₓ, or [(AA)ₓ]_{z} if such components are used as a linker between P¹ and P² or P³ and P² and/or with further components (e.g. (AA), (AA)ₓ, [(AA)ₓ]_{z} or L), the linear or branched hydrophilic polymer chain selected independent from each other from polyethylene glycol (PEG), poly-N-(2-hydroxypropyl)methacrylamide, poly-2-(methacryloyloxy)ethyl phosphorylcholines, poly(hydroxyalkyl L-asparagine), poly(2-(methacryloyloxy)ethyl phosphorylcholine), hydroxyethylstarch or poly(hydroxyalkyl L-glutamine), wherein the hydrophilic polymer chain exhibits a molecular weight of about 1 kDa to about 100 kDa, preferably of about 2 kDa to about 25 kDa; or more preferably of about 2 kDa to about 10 kDa, e.g. about 5 kDa to about 25 kDa or 5 kDa to about 10 kDa;
   [1030] P² is a cationic or polycationic peptide or protein, e.g. as defined above for the polymeric carrier formed by disulfide-crosslinked cationic components, and preferably having a length of about 3 to about 100 amino acids, more preferably having a length of about 3 to about 50 amino acids, even more preferably having a length of about 3 to about 25 amino acids, e.g. a length of about 3 to 10, 5 to 15, 10 to 20 or 15 to 25 amino acids, more preferably a length of about 5 to about 20 and even more preferably a length of about 10 to about 20;
      [1031] or
      [1032] is a cationic or polycationic polymer, e.g. as defined above for the polymeric carrier formed by disulfide-crosslinked cationic components, typically having a molecular weight of about 0.5 kDa to about 30 kDa, including a molecular weight of about 1 kDa to about 20 kDa, even more preferably of about 1.5 kDa to about 10 kDa, or having a molecular weight of about 0.5 kDa to about 100 kDa, including a molecular weight of about 10 kDa to about 50 kDa, even more preferably of about 10 kDa to about 30 kDa;
      [1033] each P² exhibiting at least two —SH-moieties, capable to form a disulfide linkage upon condensation with further components P² or component(s) P¹ and/or P³ or alternatively with further components (e.g. (AA), (AA)ₓ, or [(AA)ₓ]_{z});
   [1034] —S—S— is a (reversible) disulfide bond (the brackets are omitted for better readability), wherein S preferably represents sulphur or a —SH carrying moiety, which has formed a (reversible) disulfide bond. The (reversible) disulfide bond is preferably formed by condensation of —SH-moieties of either components P¹ and P², P² and P², or P² and P³, or optionally of further components as defined herein (e.g. L, (AA), (AA)ₓ, [(AA)ₓ]_{z}, etc); The —SH-moiety may be part of the structure of these components or added by a modification as defined below;
   [1035] L is an optional ligand, which may be present or not, and may be selected independent from the other from RGD, Transferrin, Folate, a signal peptide or signal sequence, a localization signal or sequence, a nuclear localization signal or sequence (NLS), an antibody, a cell penetrating peptide, (e.g. TAT or KALA), a ligand of a receptor (e.g. cytokines, hormones, growth factors etc), small molecules (e.g. carbohydrates like mannose or galactose or synthetic ligands), small molecule agonists, inhibitors or antagonists of receptors (e.g. RGD peptidomimetic analogues), or any further protein as defined herein, etc.;
   [1036] n is an integer, typically selected from a range of about 1 to 50, preferably from a range of about 1, 2 or 3 to 30, more preferably from a range of about 1, 2, 3, 4, or 5 to 25, or a range of about 1, 2, 3, 4, or 5 to 20, or a range of about 1, 2, 3, 4, or 5 to 15, or a range of about 1, 2, 3, 4, or 5 to 10, including e.g. a range of about 4 to 9, 4 to 10, 3 to 20, 4 to 20, 5 to 20, or 10 to 20, or a range of about 3 to 15, 4 to 15, 5 to 15, or 10 to 15, or a range of about 6 to 11 or 7 to 10. Most preferably, n is in a range of about 1, 2, 3, 4, or 5 to 10, more preferably in a range of about 1, 2, 3, or 4 to 9, in a range of about 1, 2, 3, or 4 to 8, or in a range of about 1, 2, or 3 to 7.
[1037] 10. The isRNA for use according to item 8 or 9, wherein the polymeric carrier comprises at least one of the disulfide-crosslinked cationic peptides Cys-Arg₁₂ or Cys-Arg₁₂-Cys.
[1038] 11. The isRNA for use according to any of items 7 to 10, wherein the N/P ratio of the isRNA to the cationic or polycationic compound, preferably the cationic or polycationic peptide or protein, is in the range of about 0.1 to 10, including a range of about 0.3 to 4, of about 0.5 to 2, of about 0.7 to 2 and of about 0.7 to 1.5.
[1039] 12. The isRNA for use according to any of the preceding items, wherein the isRNA is complexed with one or more lipids, thereby forming liposomes, lipid nanoparticles and/or lipoplexes.
[1040] 13. The isRNA for use according to any of the preceding items, wherein the treatment comprises administration of at least one additional pharmaceutically active ingredient.
[1041] 14. The isRNA for use according to item 13, wherein the at least one additional pharmaceutically active ingredient is a compound that is used in the treatment of a tumor or cancer disease preferably selected from the group consisting of cutaneous melanoma (cMEL), cutaneous squamous cell carcinoma (cSCC), head and neck squamous cell carcinoma (HNSCC), adenoid cystic carcinoma (ACC), cutaneous T-cell lymphoma, preferably cutaneous T-cell lymphoma of mycosis fungoides subtype, and vulvar squamous cell cancer (VSCC), wherein the tumor or the cancer disease is preferably at an advanced stage and/or refractory to standard therapy.
[1042] 15. The isRNA for use according to item 13 or 14, wherein the at least one additional pharmaceutically active ingredient is a checkpoint modulator, or a fragment or variant thereof.
[1043] 16. The isRNA for use according to item 15, wherein the checkpoint modulator is selected from the group consisting of a PD-1 inhibitor, a PD-L1 inhibitor, a PD-L2 inhibitor a CTLA-4 inhibitor, a LAG3 inhibitor, a TIM3 inhibitor, a TIGIT inhibitor an OX40 stimulator, a 4-1BB stimulator, a CD40L stimulator, a CD28 stimulator and a GITR stimulator, or a fragment or variant of any one of these checkpoint modulators.
[1044] 17. The isRNA for use according to item 16, wherein the checkpoint modulator is a PD-1 inhibitor or a PD-L1 inhibitor, wherein the PD-1 inhibitor is preferably an antagonistic antibody directed against PD-1 and the PD-L1 inhibitor is an antagonistic antibody directed against PD-L1, or a fragment or variant of said antibody.
[1045] 18. The isRNA for use according to item 16, wherein the checkpoint modulator is a CTLA-4 inhibitor, preferably an anti-CTLA4 antibody, or a fragment or variant thereof.
[1046] 19. The isRNA for use according to item 13 or 14, wherein the at least one additional pharmaceutically active ingredient is an interleukin, preferably IL-12, or a fragment or variant thereof.
[1047] 20. The isRNA for use according to any of items 1 to 19, wherein the treatment comprises administration of at least one coding RNA, preferably at least one mRNA.
[1048] 21. The isRNA for use according to item 20, wherein the at least one coding RNA comprises at least one coding sequence encoding at least one peptide or protein comprising at least one peptide or protein selected from the group consisting of
   [1049] IL-12,
   [1050] CD40L,
   [1051] a decoy PD-1 receptor, and
   [1052] an anti-CTLA4 antibody,
   [1053] or a fragment or variant of any of these.
[1054] 22. The isRNA for use according to item 20 or 21, wherein the at least one coding RNA comprises at least one coding sequence encoding a peptide or protein comprising IL-12 or a fragment or variant thereof, or an IL-12 analog, or a fragment or variant thereof.
[1055] 23. The isRNA for use according to item 20 or 21, wherein the at least one coding RNA comprises at least one coding sequence encoding a peptide or protein comprising CD40L or a fragment or variant thereof.
[1056] 24. The isRNA for use according to item 20 or 21, wherein the at least one coding RNA comprises at least one coding sequence encoding a peptide or protein comprising a decoy PD-1 receptor or a fragment or variant thereof.
[1057] 25. The isRNA for use according to item 20 or 21, wherein the at least one coding RNA comprises at least one coding sequence encoding a peptide or protein comprising an anti-CTLA4 antibody, or a fragment or variant thereof.
[1058] 26. The isRNA for use according to item 20 or 21, wherein
   [1059] the at least one coding RNA comprises at least one coding sequence encoding a peptide or protein comprising CD40L or a fragment or variant thereof and
   [1060] the same or a different coding RNA comprises at least one coding sequence encoding a peptide or protein comprising IL-12 or a fragment or variant thereof.
[1061] 27. The isRNA for use according to item 20 or 21, wherein
   [1062] the at least one coding RNA comprises at least one coding sequence encoding a peptide or protein comprising CD40L or a fragment or variant thereof, and
   [1063] the same or a different coding RNA comprises at least one coding sequence encoding a peptide or protein comprising a decoy PD-1 receptor or a fragment or variant thereof.
[1064] 28. The isRNA for use according to item 20 or 21, wherein
   [1065] the at least one coding RNA comprises at least one coding sequence encoding a peptide or protein comprising IL-12 or a fragment or variant thereof, and
   [1066] the same or a different coding RNA comprises at least one coding sequence encoding a peptide or protein comprising a decoy PD-1 receptor or a fragment or variant thereof.
[1067] 28. The isRNA for use according to item 20 or 21, wherein
   [1068] the at least one coding RNA comprises at least one coding sequence encoding a peptide or protein comprising IL-12 or a fragment or variant thereof, and
   [1069] the same or a different coding RNA comprises at least one coding sequence encoding a peptide or protein comprising at least one tumor antigen or a fragment or variant thereof.
[1070] 29. The isRNA for use according to item 20 or 21, wherein
   [1071] the at least one coding RNA comprises at least one coding sequence encoding a peptide or protein comprising CD40L or a fragment or variant thereof, and
   [1072] the same or a different coding RNA comprises at least one coding sequence encoding a peptide or protein comprising an anti-CTLA4 antibody, or a fragment or variant thereof.
[1073] 30. The isRNA for use according to item 20 or 21, wherein
   [1074] the at least one coding RNA comprises at least one coding sequence encoding a peptide or protein comprising IL-12 or a fragment or variant thereof, and
   [1075] the same or a different coding RNA comprises at least one coding sequence encoding a peptide or protein comprising an anti-CTLA4 antibody, or a fragment or variant thereof.
[1076] 31. The isRNA for use according to item 20 or 21, wherein
   [1077] the at least one coding RNA comprises at least one coding sequence encoding a peptide or protein comprising a decoy PD-1 receptor or a fragment or variant thereof, and
   [1078] the same or a different coding RNA comprises at least one coding sequence encoding a peptide or protein comprising an anti-CTLA4 antibody, or a fragment or variant thereof.
[1079] 32. The isRNA for use according to item 20 or 21, wherein
   [1080] the at least one coding RNA comprises at least one coding sequence encoding a peptide or protein comprising IL-12 or a fragment or variant thereof,
   [1081] the same or a different coding RNA comprises at least one coding sequence encoding a peptide or protein comprising CD40L or a fragment or variant thereof, and
   [1082] the same or a different coding RNA comprises at least one coding sequence encoding a peptide or protein comprising an anti-CTLA4 antibody, or a fragment or variant thereof.
[1083] 33. The isRNA for use according to item 20 or 21, wherein
   [1084] the at least one coding RNA comprises at least one coding sequence encoding a peptide or protein comprising IL-12 or a fragment or variant thereof,
   [1085] the same or a different coding RNA comprises at least one coding sequence encoding a peptide or protein comprising CD40L or a fragment or variant thereof,
   [1086] the same or a different coding RNA comprises at least one coding sequence encoding a peptide or protein comprising an anti-CTLA4 antibody, or a fragment or variant thereof, and
   [1087] optionally, the same or a different coding RNA comprises at least one coding sequence encoding a peptide or protein comprising a decoy PD-1 receptor or a fragment or variant thereof.
[1088] 34. The isRNA for use according to any of items 1 to 33, wherein the subject does not receive or has not received a treatment with a PD-1 or PD-L1 antagonist and wherein the use comprises administration of at least one peptide or protein comprising a decoy PD-1 receptor or a fragment or variant thereof, or administration of a nucleic acid, preferably a coding RNA, more preferably an mRNA, comprising a nucleic acid sequence encoding at least one peptide or protein comprising a decoy PD-1 receptor or a fragment or variant thereof.
[1089] 35. The isRNA for use according to any of items 1 to 34, wherein the subject receives or has received a treatment with a PD-1 or a PD-L1 antagonist and wherein the use does not comprise administration of at least one peptide or protein comprising a decoy PD-1 receptor or a fragment or variant thereof, or administration of a nucleic acid, preferably a coding RNA, more preferably an mRNA, comprising a nucleic acid sequence encoding at least one peptide or protein comprising a decoy PD-1 receptor or a fragment or variant thereof.
[1090] 36. The isRNA for use according to item 33, wherein each coding sequence encoding a peptide or protein is located on a separate coding RNA, preferably a separate mRNA.
[1091] 37. The isRNA for use according to item 33, wherein at least two of the coding sequences encoding a peptide or protein are located on the same coding RNA, which is preferably a bi- or multicistronic RNA.
[1092] 38. The isRNA for use according to any of items 20 to 37, wherein the at least one coding RNA is administered intratumorally.
[1093] 39. The isRNA for use according to any of items 20 to 38, wherein the at least one coding RNA is administered intradermally, intramuscularly or subcutaneously.
[1094] 40. The isRNA for use according to item 36, wherein the separate coding RNAs are formulated together and administered intratumorally.
[1095] 41. The isRNA for use according to any of items 20 to 40, wherein the isRNA is formulated together with the at least one coding RNA.
[1096] 42. The isRNA for use according to item 37, wherein the co-formulation is administered intratumorally.
[1097] 43. The isRNA for use according to any of items 20 to 42, wherein the at least one coding RNA comprises at least one coding sequence encoding a peptide or protein comprising IL-12, preferably at least one of IL-12A or IL-12B, or a fragment or variant of any of these proteins.
[1098] 44. The isRNA for use according to item 43, wherein the encoded peptide or protein comprises an amino acid sequence selected from the group consisting of SEQ ID NO: 3 to 8, or a fragment or variant of any of these sequences.
[1099] 45. The isRNA for use according to item 43 or 44, wherein the at least one coding sequence comprises a nucleic acid sequence selected from the group consisting of SEQ ID NOs: 440 to 445 or a fragment or variant of any of these sequences.
[1100] 46. The isRNA for use according to any of items 43 to 45, wherein the encoded peptide or protein comprises IL-12A and IL-12B or a fragment or variant of each of these proteins.
[1101] 47. The isRNA for use according to item 46, wherein the encoded peptide or protein comprises an amino acid sequence according to SEQ ID NO: 10 or a fragment or variant thereof.
[1102] 48. The isRNA for use according to any of items 43 to 47, wherein the at least one coding sequence comprises a nucleic acid sequence according to SEQ ID NO: 447 or a fragment or variant thereof.
[1103] 49. The isRNA for use according to any of items 20 to 48, wherein the at least one coding RNA comprises at least one coding sequence encoding a peptide or protein comprising CD40L or a fragment or variant thereof, wherein the encoded peptide or protein preferably comprises an amino acid sequence according to SEQ ID NO: 11 or a fragment or variant thereof.
[1104] 50. The isRNA for use according to item 49, wherein the at least one coding sequence comprises a nucleic acid sequence according to SEQ ID NO: 448 or a fragment or variant thereof.
[1105] 51. The isRNA for use according to any of items 20 to 50, wherein the at least one coding RNA comprises at least one coding sequence encoding a peptide or protein comprising a decoy PD-1 receptor or a fragment or variant thereof, preferably the extracellular part of a PD-1 receptor or a fragment or variant thereof.
[1106] 52. The isRNA for use according to item 51, wherein the decoy PD-1 receptor is a peptide or protein comprising soluble PD-1 or a fragment or variant thereof.
[1107] 53. The isRNA for use according to item 51 or 52, wherein the encoded peptide or protein comprises an amino acid sequence according to SEQ ID NO: 2 or 1042, or a fragment or variant thereof.
[1108] 54. The isRNA for use according to any of items 51 to 53, wherein the at least one coding sequence comprises a nucleic acid sequence according to SEQ ID NO: 439 or a fragment or variant thereof.
[1109] 55. The isRNA for use according to any of items 20 to 54, wherein the at least one coding RNA comprises at least one coding sequence encoding a peptide or protein comprising an anti-CTLA4 antibody or a fragment or variant thereof.
[1110] 56. The isRNA for use according to item 55, wherein the encoded peptide or protein comprises an amino acid sequence according to SEQ ID NO: 645 and/or 677, or a fragment or variant of any of these amino acid sequences.
[1111] 57. The isRNA for use according to item 55 or 56, wherein the at least one coding sequence comprises a nucleic acid sequence according to SEQ ID NO: 646 and/or 678, or a fragment or variant of any of these nucleic acid sequences.
[1112] 58. The isRNA for use according to items 20 to 57, wherein the at least one coding RNA comprises at least one coding sequence encoding a peptide or protein comprising at least one tumor antigen, or a fragment or variant of a tumor antigen.
[1113] 59. The isRNA for use according to item 58, wherein the tumor antigen is preferably selected from the group consisting of 1A01_HLA-A/m; 1A02; 5T4; ACRBP; AFP; AKAP4; alpha-actinin-_4/m; alpha-methylacyl-coenzyme_A_racemase; ANDR; ART-4; ARTC1/m; AURKB; B2MG; B3GN5; B4GN1; B7H4; BAGE-1; BASI; BCL-2; bcr/abl; beta-catenin/m; BING-4; BIRC7; BRCA1/m; BY55; calreticulin; CAMEL; CASP-8/m; CASPA; cathepsin_B; cathepsin_L; CD1A; CD1B; CD1C; CD1D; CD1E; CD20; CD22; CD276; CD33; CD3E; CD3Z; CD44_Isoform_1; CD44_Isoform_6; CD4; CD52; CD55; CD56; CD80; CD86; CD8A; CDC27/m; CDE30; CDK4/m; CDKN2A/m; CEA; CEAM6; CH3L2; CLCA2; CML28; CML66; COA-1/m; coactosin-like_protein; collagen_XXIII; COX-2; CP1B1; CSAG2; CT45A1; CT55; CT-_9/BRD6; CTAG2_Isoform_LAGE-1A; CTAG2_Isoform_LAGE-1B; CTCFL; Cten; cyclin_B1; cyclin_D1; cyp-B; DAM-10; DEP1A; E7; EF1A2; EFTUD2/m; EGFR; EGLN3; ELF2/m; EMMPRIN; EpCam; EphA2; EphA3; ErbB3; ERBB4; ERG; ETV6; EWS; EZH2; FABP7; FCGR3A_Version_1; FCGR3A_Version_2; FGF5; FGFR2; fibronectin; FOS; FOXP3; FUT1; G250; GAGE-1; GAGE-2; GAGE-3; GAGE-4; GAGE-5; GAGE-6; GAGE7b; GAGE-8_(GAGE-2D); GASR; GnT-V; GPC3; GPNMB/m; GRM3; HAGE; hepsin; Her2/neu; HLA-A2/m; homeobox_NKX3.1; HOM-TES-85; HPG1; HS71A; HS71B; HST-2; hTERT; iCE; IF2B3; IL10; IL-13Ra2; IL2-RA; IL2-RB; IL2-RG; IL-5; IMP3; ITA5; ITB1; ITB6; kallikrein-2; kallikrein-3; kallikrein-4; KI20A; KIAA0205; KIF2C; KK-LC-1; LDLR; LGMN; LIRB2; LY6K; MAGA5; MAGA8; MAGAB; MAGE-A10; MAGE-A12; MAGE-A1; MAGE-A2; MAGE-A3; MAGE-A4; MAGE-A6; MAGE-A9; MAGE-B10; MAGE-B16; MAGE-B17; MAGE-_B1; MAGE-B2; MAGE-B3; MAGE-B4; MAGE-B5; MAGE-B6; MAGE-C1; MAGE-C2; MAGE-C3; MAGE-D1; MAGE-D2; MAGE-D4; MAGE-_E1; MAGE-E1_(MAGE1); MAGE-E2; MAGE-F1; MAGE-H₁; MAGEL2; mammaglobin_A; MART-1/melan-A; MART-2; MC1_R; M-CSF; mesothelin; MITF; MMP1_1; MMP7; MUC-1; MUM-1/m; MUM-2/m; MYCN; MYO1A; MYO1B; MYO1C; MYO1D; MYO1E; MYO1F; MYO1G; MYO1H; NA17; NA88-A; Neo-PAP; NFYC/m; NGEP; NPM; NRCAM; NSE; NUF2; NY-ESO-1; OA1; OGT; OS-9; osteocalcin; osteopontin; p53; PAGE-4; PAI-1; PAI-2; PAP; PATE; PAX3; PAX5; PD1L1; PDCD1; PDEF; PECA1; PGCB; PGFRB; Pim-1_-Kinase; Pin-1; PLAC1; PMEL; PML; POTEF; POTE; PRAME; PRDX5/m; PRM2; prostein; proteinase-3; PSA; PSB9; PSCA; PSGR; PSM; PTPRC; RAB8A; RAGE-1; RARA; RASH; RASK; RASN; RGS5; RHAMM/CD168; RHOC; RSSA; RU1; RU2; RUNX1; S-100; SAGE; SART-_1; SART-2; SART-3; SEPR; SERPINB5; SIA7F; SIA8A; SIAT9; SIRT2/m; SOX10; SP17; SPNXA; SPXN3; SSX-1; SSX-2; SSX3; SSX-4; ST1A; STAG2; STAMP-1; STEAP-1; Survivin-2B; survivin; SYCP1; SYT-SSX-1; SYT-SSX-2; TARP; TCRg; TF2AA; TGFB1; TGFR2; TGM-4; TIE2; TKTL1; TPI/m; TRGV11; TRGV9; TRPC1; TRP-p8; TSG10; TSPY1; TVC_(TRGV3); TX101; tyrosinase; TYRP1; TYRP2; UPA; VEGFR1; WT1; and XAGE1.
[1114] 60. The isRNA for use according to item 58 or 59, wherein the encoded peptide or protein comprises an amino acid sequence selected from the group consisting of SEQ ID NOs: 1-504; 4558-4560 of PCT/EP2017/059525, or a fragment or variant of any of these sequences.
[1115] 61. The isRNA for use according to any of items 58 to 60, wherein the at least one coding sequence of the at least one coding RNA comprises a nucleic acid sequence selected from the group consisting of SEQ ID NOs: 505-4033; 4561-4591 of PCT/EP2017/059525, or a fragment or variant of any of these sequences.
[1116] 62. The isRNA for use according to any of items 58 to 61, wherein the at least one coding RNA is not administered intratumorally.
[1117] 63. The isRNA for use according to any of items 58 to 62, wherein the at least one coding RNA is administered intradermally, intramuscularly or subcutaneously.
[1118] 64. The isRNA for use according to any of items 20 to 63, wherein the at least one coding RNA comprises at least one coding sequence comprising a nucleic acid sequence that is modified compared to the nucleic acid sequence of the coding sequence of the corresponding wild type RNA, and wherein the amino acid sequence encoded by said coding sequence is preferably not modified compared to the amino acid sequence encoded by the coding sequence of the corresponding wild type RNA.
[1119] 65. The isRNA for use according to item 64, wherein the at least one coding sequence comprises
   [1120] a) a nucleic acid sequence selected from the group consisting of SEQ ID NOs: 25-30; 36-41; 47-52; 58-63; 69-74; 80-85; 91-96; 102-107; 113-118; 124-129; 135-140; 601-606; 612-617; 623-628; 716-725; 727; 1018-1021 and 1059-1062, or a fragment or variant of any of these sequences, preferably from the group consisting of 32; 43; 54; 65; 76; 87; 98; 109; 120; 131; 142; 608; 619; 630; 632-644; 726 and 1058, or a fragment or variant of any of these sequences;
   [1121] b) a nucleic acid sequence selected from the group consisting of SEQ ID NOs: 33; 44; 55; 66; 77; 88; 99; 110; 121; 132; 143; 609; 620; 631; 728-738 and 1025-1028, or a fragment or variant of any of these sequences,
   [1122] c) a nucleic acid sequence selected from the group consisting of SEQ ID NO: 646-660; 662-676; 678-692; 694-705; 707-715 and 1029-1041, or a fragment or variant of any of these nucleic acid sequences, and/or
   [1123] d) optionally, a nucleic acid sequence selected from the group consisting of SEQ ID NOs: 23; 34; 45; 56; 67; 78; 89; 100; 111; 122; 133; 599; 610; 621 and 1022-1024, or a fragment or variant of any of these sequences, preferably from the group consisting of SEQ ID NOs: 24; 35; 46; 57; 68; 79; 90; 101; 112; 123; 134; 600; 611; 622 and 1043-1054, or a fragment or variant of any of these sequences.
[1124] 66. The isRNA for use according to any of items 20 to 65, wherein the at least one coding RNA comprises at least one coding sequence having a modified, preferably an increased, G/C content compared to the G/C content of the coding sequence of the corresponding wild type RNA, and wherein the amino acid sequence encoded by said coding sequence is preferably not modified compared to the amino acid sequence encoded by the coding sequence of the corresponding wild type RNA.
[1125] 67. The isRNA for use according to item 66, wherein the at least one coding sequence comprises
   [1126] a) a nucleic acid sequence selected from the group consisting of SEQ ID NOs: 25-30; 80-85; 91-96; 102-107; 113-118; 601-606; 124-129; 135-140; 612-617; 623-628; 716-725; 727 and 1018-1021 and 1059-1062, or a fragment or variant of any of these sequences, preferably from the group consisting of SEQ ID NOs: 32; 87; 98; 109; 120; 131; 142; 608; 619; 630; 632; 636-644 and 726 and 1058, or a fragment or variant of any of these sequences;
   [1127] b) a nucleic acid sequence selected from the group consisting of SEQ ID NOs: 33; 88; 99; 110; 121; 132; 143; 609; 620; 631; 728-738 and 1025-1028, or a fragment or variant of any of these sequences,
   [1128] c) a nucleic acid sequence selected from the group consisting of SEQ ID NOs: 646; 650-658; 662; 666-674; 678; 682-690; 694; 698-705; 707; 710; 713 and 1029-1041, or a fragment or variant of any of these nucleic acid sequences, and/or
   [1129] d) optionally, a nucleic acid sequence selected from the group consisting of SEQ ID NOs: 23; 78; 89; 100; 111; 122; 133; 599; 610; 621 and 1022-1024, or a fragment or variant of any of these sequences, preferably from the group consisting of SEQ ID NOs: 24; 79; 90; 101; 112; 123; 134; 600; 611; 622 and 1043-1054, or a fragment or variant of any of these sequences.
[1130] 68. The isRNA for use according to any of items 20 to 67, wherein the at least one coding RNA comprises a 5′-CAP structure.
[1131] 69. The isRNA for use according to any of items 20 to 68, wherein the at least one coding RNA comprises a 5′-UTR element and/or a 3′-UTR element.
[1132] 70. The isRNA for use according to any of items 20 to 69, wherein the at least one coding RNA comprises a poly(A) and/or a poly(C) sequence.
[1133] 71. The isRNA for use according to any of items 20 to 70, wherein the at least one coding RNA comprises a histone stem-loop sequence.
[1134] 72. The isRNA for use according to any of items 20 to 71, wherein the at least one coding RNA comprises
   [1135] a) a nucleic acid sequence selected from the group consisting of SEQ ID NOs: 146-151; 451-456; 157-162; 168-173; 179-184; 190-195; 201-206; 212-217; 223-228; 234-239; 245-250; 256-261 and 267-272, or a fragment or variant of any of these sequences, preferably from the group consisting of SEQ ID NOs: 153; 458; 164; 175; 186; 197; 208; 219; 230; 241; 252; 263, 274; 992 and 598, or a fragment or variant of any of these sequences,
   [1136] b) a nucleic acid sequence selected from the group consisting of SEQ ID NOs: 154; 459; 165; 176; 187; 198; 209; 220; 231; 242; 253; 264, 275 and 596, or a fragment or variant of any of these sequences,
   [1137] c) a nucleic acid sequence selected from the group consisting of SEQ ID NOs: 594; 595; 860-925, or a fragment or variant of any of these sequences, and/or
   [1138] d) optionally, a nucleic acid sequence selected from the group consisting of SEQ ID NOs: 144; 449; 155; 166; 177; 188; 199; 210; 221; 232; 243; 254 and 265, or a fragment or variant of any of these sequences, preferably from the group consisting of SEQ ID NOs: 145; 450; 156; 167; 178; 189; 200; 211; 222; 233; 244; 255; 266 and 597, or a fragment or variant of any of these sequences.
[1139] 73. The isRNA for use according to item any of items 20 to 72, wherein the treatment comprises administration, preferably intratumoral administration, of at least three coding RNAs, wherein
   [1140] a first coding RNA comprises a nucleic acid sequence selected from the group consisting of SEQ ID NOs: 153; 164; 175; 186; 197; 208; 219; 230; 241; 252; 263; 274; 992; 458; 598; 32; 43; 54; 65; 76; 87; 98; 109; 120; 131; 142; 608; 619; 630; 632-644; 726 and 1058, or a fragment or variant of any of these sequences,
   [1141] a second coding RNA comprises a nucleic acid sequence selected from the group consisting of SEQ ID NOs: 33; 44; 55; 66; 77; 88; 99; 110; 121; 132; 143; 609; 620; 631; 728-738; 1025-1028; 154; 165; 176; 187; 198; 209; 220; 231; 242; 253; 264; 275; 459 and 596, or a fragment or variant of any of these sequences,
   [1142] a third coding RNA comprises a nucleic acid sequence selected from the group consisting of SEQ ID NOs: 920-922; 923-925; 646-660; 662-676; 678-692; 694-705; 707-715 or 1029-1041, or a fragment or variant of any of these sequences, and
   [1143] optionally, a fourth coding RNA comprises a nucleic acid sequence selected from the group consisting of SEQ ID NOs: 145; 156; 167; 178; 189; 200; 211; 222; 233; 244; 255; 266; 450; 597; 24; 35; 46; 57; 68; 79; 90; 101; 112; 123; 134; 600; 611; 622 and 1043-1054, or a fragment or variant of any of these sequences.
[1144] 74. The isRNA for use according to claim any of items 20 to 73, wherein the treatment comprises administration, preferably intratumoral administration, of at least four coding RNAs, wherein
   [1145] a first coding RNA comprises a nucleic acid sequence selected from the group consisting of SEQ ID NOs: 153; 164; 175; 186; 197; 208; 219; 230; 241; 252; 263; 274; 992; 458 and 598, or a fragment or variant of any of these sequences,
   [1146] a second coding RNA comprises a nucleic acid sequence selected from the group consisting of SEQ ID NOs: 154; 165; 176; 187; 198; 209; 220; 231; 242; 253; 264; 275; 459 and 596, or a fragment or variant of any of these sequences,
   [1147] a third coding RNA comprises a nucleic acid sequence selected from the group consisting of SEQ ID NOs: 594 and 860-874, or a fragment or variant of any of these sequences,
   [1148] a fourth coding RNA comprises a nucleic acid sequence selected from the group consisting of SEQ ID NOs: 595 and 890-904, or a fragment or variant of any of these sequences, and
   [1149] optionally, a fifth coding RNA comprises a nucleic acid sequence selected from the group consisting of SEQ ID NOs: 145; 156; 167; 178; 189; 200; 211; 222; 233; 244; 255; 266; 450 and 597, or a fragment or variant of any of these sequences.
[1150] 75. The isRNA for use according to any of items 20 to 74, wherein the at least one coding RNA comprises
   [1151] a) a nucleic acid sequence selected from the group consisting of SEQ ID NOs: 278-283; 289-294; 300-305; 311-316; 322-327; 333-338; 344-349; 355-360; 366-371; 377-382; 388-393; 399-404 and 462-467, or a fragment or variant of any of these sequences, preferably from the group consisting of SEQ ID NOs: 285; 296; 307; 318; 329; 340; 351; 362; 373; 384; 395; 406; 430; 469 and 992, or a fragment or variant of any of these sequences,
   [1152] b) a nucleic acid sequence selected from the group consisting SEQ ID NO: 286; 297; 308; 319; 330; 341; 352; 363; 374; 385; 396; 470 and 407, or a fragment or variant of any of these sequences, and/or
   [1153] c) a nucleic acid sequence selected from the group consisting of SEQ ID NOs: 926-955; or a fragment or variant of any of these nucleic acid sequences, and a nucleic acid sequence selected from the group consisting of SEQ ID NOs: 956-985, or a fragment or variant of any of these nucleic acid sequences; or a nucleic acid sequence selected from the group consisting of SEQ ID NOs: 986-991, or a fragment or variant of any of these nucleic acid sequences, and/or
   [1154] d) optionally, a nucleic acid sequence selected from the group consisting of SEQ ID NOs: 276; 287; 298; 309; 320; 331; 342; 353; 364; 375; 386; 460 and 397, or a fragment or variant of any of these sequences, preferably from the group consisting of SEQ ID NOs: 277; 288; 299; 310; 321; 332; 343; 354; 365; 376; 461; 387 and 398 or a fragment or variant of any of these sequences.
[1155] 76. The isRNA for use according to any of items 20 to 65, wherein the treatment comprises administration, preferably intratumoral administration, of at least four coding RNAs, wherein
   [1156] a first coding RNA comprises a nucleic acid sequence selected from the group consisting of SEQ ID NOs: 285; 296; 307; 318; 329; 340; 351; 362; 373; 384; 395; 406; 430; 469 and 992, or a fragment or variant of any of these sequences,
   [1157] a second coding RNA comprises a nucleic acid sequence selected from the group consisting of SEQ ID NOs: 286; 297; 308; 319; 330; 341; 352; 363; 374; 385; 396; 470 and 407, or a fragment or variant of any of these sequences,
   [1158] a third coding RNA comprises a nucleic acid sequence selected from the group consisting of SEQ ID NOs: 926-940, or a fragment or variant of any of these sequences, and/or
   [1159] a fourth coding RNA comprises a nucleic acid sequence selected from the group consisting of SEQ ID NOs: 956-970, or a fragment or variant of any of these sequences and/or
   [1160] optionally, a fifth coding RNA comprises a nucleic acid sequence selected from the group consisting of SEQ ID NOs: 277; 288; 299; 310; 321; 332; 343; 354; 365; 376; 387; 461 and 398, or a fragment or variant of any of these sequences.
[1161] 77. The isRNA for use according to any of items 20 to 76, wherein the isRNA is administered as RNA complexed with one or more cationic or polycationic compounds, and the at least one coding RNA, more preferably an mRNA, is administered as free RNA or is administered as RNA that is complexed with one or more lipids, thereby forming liposomes, lipid nanoparticles and/or lipoplexes.
[1162] 78. The isRNA for use according to any of items 1 to 77, wherein the treatment comprises chemotherapy, radiation therapy and/or surgery.
[1163] 79. Pharmaceutical composition comprising an immunostimulatory RNA (isRNA) and a pharmaceutically acceptable carrier and/or vehicle for use in the treatment or prophylaxis of a tumor or cancer disease selected from the group consisting of cutaneous melanoma (cMEL), cutaneous squamous cell carcinoma (cSCC), head and neck squamous cell carcinoma (HNSCC), adenoid cystic carcinoma (ACC), cutaneous T-cell lymphoma, preferably cutaneous T-cell lymphoma of mycosis fungoides subtype, and vulvar squamous cell cancer (VSCC), wherein the tumor or the cancer disease is preferably at an advanced stage and/or refractory to standard therapy, wherein the pharmaceutical composition is administered intratumorally.
[1164] 80. The pharmaceutical composition for use according to item 79, wherein the isRNA is as defined in items 1 to 12.
[1165] 81. The pharmaceutical composition for use according to item 79 or 80, wherein the treatment comprises administration of at least one additional pharmaceutically active ingredient, preferably as defined in any of items 13 to 68.
[1166] 82. Kit or kit of parts comprising an immunostimulatory RNA (isRNA), preferably the isRNA as defined in items 1 to 12, or the pharmaceutical composition as defined in any of items 79 to 81, and optionally technical instructions with information on the administration and dosage for administration,
   [1167] for use in the treatment of a tumor or cancer disease selected from the group consisting of cutaneous melanoma (cMEL), cutaneous squamous cell carcinoma (cSCC), head and neck squamous cell carcinoma (HNSCC), adenoid cystic carcinoma (ACC), cutaneous T-cell lymphoma, preferably cutaneous T-cell lymphoma of mycosis fungoides subtype, and vulvar squamous cell cancer (VSCC), wherein the tumor or the cancer disease is preferably at an advanced stage and/or refractory to standard therapy,
   [1168] wherein the pharmaceutical composition is administered intratumorally.
[1169] 83. Use of an isRNA, preferably the isRNA as defined according to any of items 1 to 12, the pharmaceutical composition as defined in any of items 79 to 81, or the kit or kit of parts as defined in item 82, for use in the manufacture of a medicament for treatment of a tumor or cancer disease selected from the group consisting of cutaneous melanoma (cMEL), cutaneous squamous cell carcinoma (cSCC), head and neck squamous cell carcinoma (HNSCC), adenoid cystic carcinoma (ACC), cutaneous T-cell lymphoma, preferably cutaneous T-cell lymphoma of mycosis fungoides subtype, and vulvar squamous cell cancer (VSCC), wherein the tumor or the cancer disease is preferably at an advanced stage and/or refractory to standard therapy, for intratumoral, peritumoral or locoregional administration, preferably for intratumoral administration.
[1170] 84. Method of treating or preventing a disorder selected from the group consisting of cutaneous melanoma (cMEL), cutaneous squamous cell carcinoma (cSCC), head and neck squamous cell carcinoma (HNSCC), adenoid cystic carcinoma (ACC), cutaneous T-cell lymphoma, preferably cutaneous T-cell lymphoma of mycosis fungoides subtype, and vulvar squamous cell cancer (VSCC), wherein the disorder is preferably at an advanced stage and/or refractory to standard therapy, wherein the method comprises administering, preferably intratumorally, to a subject in need thereof an effective amount of an isRNA, preferably the isRNA as defined according to any of items 1 to 12, the pharmaceutical composition as defined in any of items 79 to 81, or the kit or kit of parts as defined in item 82.
[1171] 85. Combination of an isRNA and at least one coding RNA, wherein the at least one coding RNA encodes at least one peptide or protein comprising IL-12, CD40L, a decoy PD-1 receptor, an anti-CTLA4 antibody, and/or a tumor antigen, or a fragment or variant of each of these proteins.
[1172] 86. The combination according to item 85, wherein the isRNA is an isRNA as defined in any of items 4 to 12.
[1173] 87. The combination according to item 85 or 86, wherein the at least one coding RNA is a coding RNA as defined in any of items 13 to 78.
[1174] 88. The combination according to any of items 85 to 87, wherein the isRNA and the at least one coding RNA are formulated together or separately.
[1175] 89. The combination according to any of items 85 to 88, wherein the isRNA and the at least one coding RNA are administered concomitantly.
[1176] 90. The combination according to any of items 85 to 89, wherein the isRNA and the at least one coding RNA are administered at the same site.
[1177] 91. The combination according to any of items 85 to 90 for use in the treatment or prophylaxis of a disease selected from the group consisting of tumor and cancer disease, infectious diseases, allergies and autoimmune diseases.
[1178] 92. The combination according to item 91, wherein the combination is for use in the treatment or prophylaxis of a tumor or a cancer disease.
[1179] 93. The combination according to item 92, wherein the combination is for use in the treatment or prophylaxis of a tumor or cancer disease selected from the group consisting of cutaneous melanoma (cMEL), cutaneous squamous cell carcinoma (cSCC), head and neck squamous cell carcinoma (HNSCC), adenoid cystic carcinoma (ACC), cutaneous T-cell lymphoma, preferably cutaneous T-cell lymphoma of mycosis fungoides subtype, and vulvar squamous cell cancer (VSCC), wherein the tumor or the cancer disease is preferably at an advanced stage and/or refractory to standard therapy.
[1180] 94. The combination according to item 93, wherein the combination is administered intratumorally
[1181] 95. The combination according to item 93 or 94, wherein the treatment or prophylaxis comprises administration of at least one additional pharmaceutically active ingredient.
[1182] 96. The combination according to item 95, wherein the at least one additional pharmaceutically active ingredient is a compound as defined in items 14 to 18.
[1183] 97. The combination according to item 96, wherein the at least one additional pharmaceutically active ingredient is a PD-1 inhibitor or a PD-L1 inhibitor, preferably an antagonistic antibody directed against PD-1 or PD-L1, or a fragment or variant thereof.
[1184] 98. The combination according to item 96, wherein the at least one additional pharmaceutically active ingredient is an anti-CTLA4 antibody, or a fragment or variant thereof.
[1185] 99. Coding RNA encoding a protein comprising at least one peptide or protein comprising IL-12, CD40L, a decoy PD-1 receptor, an anti-CTLA4 antibody, and/or a tumor antigen, or a fragment or variant of any of these proteins.
[1186] 100. The coding RNA according to item 99, which is a coding RNA as defined in any of items 13 to 78.
[1187] 101. The coding RNA according to item 99 or 100 for use in the treatment or prophylaxis of a tumor or cancer disease selected from the group consisting of cutaneous melanoma (cMEL), cutaneous squamous cell carcinoma (cSCC), head and neck squamous cell carcinoma (HNSCC), adenoid cystic carcinoma (ACC), cutaneous T-cell lymphoma, preferably cutaneous T-cell lymphoma of mycosis fungoides subtype, and vulvar squamous cell cancer (VSCC), wherein the tumor or the cancer disease is preferably at an advanced stage and/or refractory to standard therapy.
[1188] 102. The coding RNA for use according to item 101, wherein the coding RNA comprises at least one coding sequence encoding a peptide or protein comprising IL-12 or a fragment or variant thereof.
[1189] 103. The coding RNA for use according to any of items 99 to 102, wherein the at least one coding RNA comprises
   [1190] at least one coding sequence encoding a peptide or protein comprising CD40L or a fragment or variant thereof and
   [1191] at least one coding sequence encoding a peptide or protein comprising IL-12 or a fragment or variant thereof.
[1192] 104. The coding RNA for use according to any of items 99 to 103, wherein the at least one coding RNA comprises
   [1193] at least one coding sequence encoding a peptide or protein comprising CD40L or a fragment or variant thereof, and
   [1194] at least one coding sequence encoding a peptide or protein comprising a decoy PD-1 receptor or a fragment or variant thereof.
[1195] 105. The coding RNA for use according to any of items 99 to 104, wherein the at least one coding RNA comprises
   [1196] at least one coding sequence encoding a peptide or protein comprising IL-12 or a fragment or variant thereof, and
   [1197] at least one coding sequence encoding a peptide or protein comprising a decoy PD-1 receptor or a fragment or variant thereof.
[1198] 106. The coding RNA for use according to any of items 99 to 105, wherein the at least one coding RNA comprises
   [1199] at least one coding sequence encoding a peptide or protein comprising IL-12 or a fragment or variant thereof, and
   [1200] at least one coding sequence encoding at least one tumor antigen or a fragment or variant thereof.
[1201] 107. The coding RNA for use according to any of items 99 to 106, wherein the at least one coding RNA comprises
   [1202] at least one coding sequence encoding a peptide or protein comprising CD40L or a fragment or variant thereof, and
   [1203] at least one coding sequence encoding a peptide or protein comprising an anti-CTLA4 antibody, or a fragment or variant thereof.
[1204] 108. The coding RNA for use according to any of items 99 to 107, wherein the at least one coding RNA comprises
   [1205] at least one coding sequence encoding a peptide or protein comprising IL-12 or a fragment or variant thereof, and
   [1206] at least one coding sequence encoding a peptide or protein comprising an anti-CTLA4 antibody, or a fragment or variant thereof.
[1207] 109. The coding RNA for use according to any of items 99 to 108, wherein the at least one coding RNA comprises
   [1208] at least one coding sequence encoding a peptide or protein comprising a decoy PD-1 receptor or a fragment or variant thereof, and
   [1209] at least one coding sequence encoding a peptide or protein comprising an anti-CTLA4 antibody, or a fragment or variant thereof.
[1210] 110. The coding RNA for use according to any of items 99 to 109, wherein the at least one coding RNA comprises
   [1211] at least one coding sequence encoding a peptide or protein comprising IL-12 or a fragment or variant thereof,
   [1212] at least one coding sequence encoding a peptide or protein comprising CD40L or a fragment or variant thereof, and
   [1213] at least one coding sequence encoding a peptide or protein comprising an anti-CTLA4 antibody, or a fragment or variant thereof.
[1214] 111. The coding RNA for use according to any of items 99 to 110, wherein the treatment or prophylaxis comprises administration of a second coding RNA, and/or a third coding RNA, wherein
   [1215] the coding RNA comprises at least one coding sequence encoding a peptide or protein comprising IL-12 or a fragment or variant thereof,
   [1216] the second coding RNA comprises at least one coding sequence encoding a peptide or protein comprising CD40L or a fragment or variant thereof,
   [1217] the third coding RNA comprises at least one coding sequence encoding a peptide or protein comprising an anti-CTLA4 antibody, or a fragment or variant thereof.
[1218] 112. The coding RNA for use according to item 111, wherein the treatment or prophylaxis further comprises administration of a fourth coding RNA, wherein the fourth coding RNA comprises at least one coding sequence encoding a peptide or protein comprising a decoy PD-1 receptor or a fragment or variant thereof
[1219] 113. The coding RNA for use according to item 111 or 112, wherein the second RNA, the third RNA, and/or the fourth RNA is a coding RNA as defined in any of items 13 to 78.
[1220] 114. The coding RNA for use according to any of items 101 to 113, wherein the treatment or prophylaxis comprises administration of an isRNA.
[1221] 115. The coding RNA for use according to item 114, wherein the isRNA is an isRNA as defined in any of items 4 to 12.
[1222] 116. The coding RNA for use according to any of items 101 to 115, wherein the at least one coding RNA is administered intratumorally,
[1223] 117. The coding RNA for use according to any of items 101 to 116, wherein the treatment or prophylaxis comprises administration of at least one additional pharmaceutically active ingredient, preferably a compound that is conventionally used in the treatment of a tumor or cancer disease selected from the group consisting of cutaneous melanoma (cMEL), cutaneous squamous cell carcinoma (cSCC), head and neck squamous cell carcinoma (HNSCC), adenoid cystic carcinoma (ACC), cutaneous T-cell lymphoma, preferably cutaneous T-cell lymphoma of mycosis fungoides subtype, and vulvar squamous cell cancer (VSCC), wherein the tumor or the cancer disease is preferably at an advanced stage and/or refractory to standard therapy.
[1224] 118. The coding RNA for use according to item 117, wherein the at least one additional pharmaceutically active ingredient is a compound as defined in any of items 14 to 33.
[1225] 119. The coding RNA for use according to item 117 or 118, wherein the at least one additional pharmaceutically active ingredient is a PD-1 inhibitor or a PD-L1 inhibitor, preferably an antagonistic antibody directed against PD-1 or PD-L1, or a fragment or variant thereof.
[1226] 120. The coding RNA for use according to any one of items 117 to 119, wherein the at least one additional pharmaceutically active ingredient is an anti-CTLA4 antibody, or a fragment or variant thereof.

### BRIEF DESCRIPTION OF THE FIGURES

[1227] The examples and figures shown in the following are merely illustrative and shall describe the present invention in a further way. These figures and examples shall not be construed to limit the present invention thereto.

[1228] FIG. 1: Panel (A) shows an analysis of the median tumor growth of Balb/C mice bearing CT26 tumors after intratumoral treatment with RNAdjuvant, mRNA encoding IL-12 and mRNA-encoded soluble PD-1. Respective combinations of these compounds, including control groups, were tested as indicated in the figure. The experiment was performed as described in Example 1.
[1229] Panel (B) shows survival proportions of mice bearing CT26 tumors after intratumoral treatment with RNAdjuvant, mRNA encoding IL-12 and mRNA encoded soluble PD-1. Respective combinations of these compounds, including control groups, were tested as indicated in the figure. The experiment was performed as described in Example 1. Kaplan-Meier survival curves are presented.

[1230] FIG. 2: shows survival proportions of Balb/C mice bearing CT26 tumors after intratumoral treatment with RNAdjuvant and intraperitoneal treatment of an anti-PD-1 antibody. Respective combinations of these compounds, including control groups, were tested as indicated in the figure. The experiment was performed as described in Example 2. Kaplan-Meier survival curves are presented.

[1231] FIG. 3: shows survival proportions of Balb/C mice bearing CT26 tumors after intratumoral treatment with RNAdjuvant, mRNA encoding IL-12 and mRNA-encoded CD40L compared to intratumoral treatment with mRNA encoding IL-12 alone. Respective combinations of these compounds, including control groups, were tested as indicated in the figure. The experiment was performed as described in Example 3. Kaplan-Meier survival curves are presented.

[1232] FIG. 4: shows an analysis of the median tumor growth after re-challenge of Balb/C mice with syngeneic CT26 colon carcinoma cells at day 113 after the first tumor challenge. Mice were previously treated intratumorally with RNAdjuvant alone or in combination with anti-PD1 treatment. Respective combinations of these compounds, including control groups, were tested as indicated in the figure. The experiment was performed as described in Example 4.

[1233] FIG. 5: shows an analysis of the median tumor growth after re-challenge of Balb/C mice with syngeneic CT26 colon carcinoma cells at day 113 after the first tumor challenge. Mice were previously treated intratumorally with RNAdjuvant alone or in combination with an mRNA encoding CD40L and an mRNA-encoded IL-12. Respective combinations of these compounds, including control groups, were tested as indicated in the figure. The experiment was performed as described in Example 5.

[1234] FIG. 6: shows an analysis of the median tumor growth of Balb/C mice bearing CT26 tumors after intratumoral treatment with immunostimulating RNA (RNAdjuvant), mRNA encoding soluble PD1 (solPD1) and CD40 ligand (CD40L) in combination with a checkpoint inhibitor anti CTLA4 antibody. The experiment was performed as described in Example 7.

[1235] FIG. 7: shows an analysis of the median tumor growth of the untreated lesion of Balb/C mice bearing CT26 tumors in both flanks after intratumoral treatment of one lesion with immunostimulating RNA (RNAdjuvant), mRNA encoding soluble PD1 (solPD1) and CD40 ligand (CD40L) in combination with an anti-CTLA4 checkpoint antibody. The experiment was performed as described in Example 8.

[1236] FIG. 8: Panel (A) shows an analysis of the median tumor growth of Balb/C mice bearing E.G7-OVA tumors after intratumoral treatment with immunostimulatory RNAdjuvant and vaccinated i.d. with OVA (RNActive) or in combination with an anti-PD1 checkpoint inhibitor (administered i.p.) and PpLuc RNActive or buffer as unspecific control. The experiment was performed as described in Example 10.
[1237] Panel (B) shows survival proportions of mice bearing E.G7-OVA tumors after intratumoral treatment with immunostimulatory RNAdjuvant and vaccinated i.d. with OVA (RNActive) or in combination with a checkpoint inhibitor anti PD1 (administered i.p.) and PpLuc RNActive or buffer as unspecific control. The experiment was performed as described in Example 10. Kaplan-Meier survival curves are presented.

[1238] FIG. 9: Panel (A) shows an analysis of the median tumor growth of Balb/C mice bearing E.G7-OVA tumors after intratumoral treatment with immunostimulatory RNAdjuvant and an mRNA encoding IL12 vaccinated i.d. with OVA (RNActive) and PpLuc RNActive or buffer as unspecific control. The experiment was performed as described in Example 11.
[1239] Panel (B) shows survival proportions of mice bearing E.G7-OVA tumors after intratumoral treatment with immunostimulatory RNAdjuvant and an mRNA encoding IL12 vaccinated i.d. with OVA (RNActive) and PpLuc RNActive or buffer as unspecific control. The experiment was performed as described in Example 11. Kaplan-Meier survival curves are presented.

[1240] FIG. 10: Panel (A) shows translated mRNA products of IL12 in the supernatant of RNA transfected A375 cells after 5 hours. The experiment was performed as described in Example 13.
[1241] Panel (B) shows translated mRNA products of IL12 in the supernatant of RNA transfected A375 cells after 24 hours. The experiment was performed as described in Example 13.

[1242] FIG. 11: Panel (A) shows translated mRNA products of solPD1 in the supernatant of RNA transfected A375 cells after 5 hours. The experiment was performed as described in Example 13.
[1243] Panel (B) shows translated mRNA products of solPD1 in the supernatant of RNA transfected A375 cells after 24 hours. The experiment was performed as described in Example 13.

[1244] FIG. 12: Panel (A) shows translated mRNA products of anti-CTLA4 antibody in the supernatant of RNA transfected A375 cells after 5 hours. The experiment was performed as described in Example 13.
[1245] Panel (B) shows translated mRNA products of anti-CTLA4 antibody in the supernatant of RNA transfected A375 cells after 24 hours. The experiment was performed as described in Example 13.

[1246] FIG. 13: shows membrane bound translated mRNA product of CD40LG on transfected A375 cells after 24 hours analyzed by FACS analysis. The experiment was performed as described in Example 13.

### EXAMPLES

[1247] The Examples shown in the following are merely illustrative and shall describe the present invention in a further way. These Examples shall not be construed to limit the present invention thereto.

[1248] Preparation of DNA, mRNA Constructs and Immunostimulatory RNA (RNAdjuvant)

[1249] 1. Preparation of DNA and RNA Constructs

TABLE 3
RNA constructs

| | | SEQ ID |
|---|---|---|
| RNA | Description | NO: |
| R2025 R2391 | Non-coding immunostimulatory | 433 |
| | RNA (RNAdjuvant) | |
| R2763 | mRNA encoding murine | 430 |
| | IL-12 (IL-12 (GC)) | |
| R3971 | mRNA encoding murine soluble | 431 |
| | PD-1 (soluble PD-1 (GC)) | |
| R3571 | mRNA encoding murine CD40L | 432 |
| | (CD40L (GC)) | |
| R5417 | mRNA encoding heavy chain (HC) of | 594 |
| | anti-CTLA4 antibody (HC | |
| | anti-CTLA4 Ab (GC)) | |
| R5418 | mRNA encoding light chain (LC) of | 595 |
| | anti-CTLA4 antibody (HLC | |
| | anti-CTLA4 Ab (GC)) | |

[1250] The constructs of IL-12 (GC), soluble PD-1 (GC) (solPD1), CD40L (GC) and two anti-CTLA4 antibody chains were prepared by a stabilizing sequence derived from the albumin-3′-UTR, a stretch of 64 adenosines (poly(A)-sequence), a stretch of 30 cytosines (poly(C)-sequence), and a histone stem loop. Most DNA sequences were prepared by modifying the wild type encoding DNA sequences by introducing a GC-optimized sequence for stabilization, using an in silico algorithm that increase the GC content of the respective coding sequence compared to the wild type coding sequence. The mRNAs expressing human IL-12, soluble PD-1 receptor, CD40L and anti-CTLA4 antibody are prepared in analogous manner by using the corresponding human coding sequences.

[1251] For the present example, a DNA sequence encoding the non-coding immunostimulatory RNA (isRNA) R2025 was prepared and used for subsequent RNA in vitro transcription reactions.

[1252] 2. RNA In Vitro Transcription

[1253] The respective DNA plasmids prepared according to section 1 above were transcribed in vitro using T7 polymerase. The RNA in vitro transcription reactions of the IL-12, CD40L, soluble PD-1 and anti-CTLA4 antibody encoding constructs were performed in the presence of a CAP analog (m7GpppG). The isRNA R2025 was prepared without CAP analog. Subsequently, the RNA was purified using PureMessenger® (CureVac, Tübingen, Germany; WO2008077592).

[1254] 3. Preparation of the Polymeric Cargo Complex (“RNAdjuvant”)

[1255] The following cationic peptide as cationic component of the polymeric carrier was used (Cys-Arg12-Cys or CR12C) according to SEQ ID NO: 579 or SEQ ID NO: 580.

[1256] For synthesis of the polymeric carrier cargo complexes, an RNA molecule having the RNA sequence R2025 as defined in section 1 above was mixed with the cationic CR12C peptide component as defined above. The specified amount of the RNA was mixed with the respective cationic component in mass ratios as indicated below, thereby forming a complex. If polymerizing cationic components were used according to the present invention, polymerization of the cationic components took place simultaneously to complexation of the nucleic acid cargo. Afterwards, the resulting solution was adjusted with water to a final volume of 50 μl and incubated for 30 minutes at room temperature. Further details are described in WO2012013326.

[1257] The mass ratio of peptide:RNA was 1:3,7. The polymeric carrier cargo complex is formed by the disulfide-crosslinked cationic peptide CR12C as carrier and the immunostimulatory R2025 as nucleic acid cargo. This polymeric carrier cargo complex R2025/CR12C (R2391) was used as adjuvant in the following examples (referred to as “RNAdjuvant”)

[1258] 4. Preparation of the RNA for Administration

[1259] IL-12 mRNA (R1328), soluble PD-1 mRNA (R3971) and CD40L mRNA (R3571) were administered in Ringer's Lactate (RiLa) solution. The co-formulation of naked mRNAs and the polymeric carrier cargo complex “RNAdjuvant” (R2391) were also administered in Ringer's Lactate (RiLa) after mixing of both components directly before injection.

### Example 1: Intratumoral Treatment with an Immunostimulating RNA (“RNAdjuvant”) and an mRNA Encoding Soluble PD-1 and an mRNA Encoding IL-12

[1260] Balb/c mice (see Table 4) were injected subcutaneously (s.c.) with 1×10⁶ CT26 cells (colon carcinoma cell line) per mouse (in a volume of 100 μl PBS) on the right flank on day 0 of the experiment. At day 9 after tumor challenge, mice were sorted according to the tumor size to obtain groups with a mean tumor volume of approximately 50 mm³. Intratumoral (i.t.) therapy started at day 9 and continued twice a week for three weeks. Mice were injected with a combination of RNAdjuvant (25 μg of R2391), mRNA-encoded IL-12 (25 μg of R2763) and mRNA-encoded soluble PD-1 (R3971) (group A according to Table 2) or mRNA-encoded IL-12 (25 μg of R2763) (group B according to Table 2) alone or RNAdjuvant (25 μg of R2391) alone (group C according to Table 2). To control for anti-tumor effects due to injection procedure, mice were injected with buffer (RiLa, group D according to Table 4), respectively.

[1261] Tumor growth was monitored by measuring the tumor size in three dimensions using a calliper. Tumor volume was calculated according to the following formula:

$$volume ( {mm}^{3} ) = \frac{length ( mm ) \times π \times {width}^{2} ( {mm}^{2} )}{6}$$

[1262] On days 9, 11, 14, 17 and 21 of the experiment mice were injected intratumorally (i.t.) with RNA according to the Table 4 below. The volume for intratumoral injection was 50 μl.

[1263] Table 4 summarizes the treatment as used in the present example. RNAdjuvant and the mRNA constructs encoding IL-12 and soluble PD-1 were administered intratumorally (i.t.). In CT26 tumor challenged mice, survival rates and median tumor growth were analyzed.

TABLE 4
Groups, treatment and RNA dilution

| | No. of | | Amount of | Vaccination |
|---|---|---|---|---|
| Group | mice | Constructs | RNA (μg) | schedule |
| A | 10 | RNAdjuvant + IL-12 + | 25 each | 2x week |
| | | soluble PD-1 | | |
| B | 10 | IL-12 | 25 | 2x week |
| C | 10 | RNAdjuvant | 25 | 2x week |
| D | 10 | RiLa | — | 2x week |

[1264] Tumor Challenge and Administration of the Inventive Composition:

[1265] Mice were injected according to the indicated scheme shown in Table 4. Median tumor growth was determined according to formula above. The results of the experiment are shown in FIG. 1, wherein FIG. 1A shows the effect of the inventive composition on tumor growth and FIG. 1B shows the effect of the inventive composition on survival.

[1266] Results:

[1267] The results in FIG. 1A show that the inventive composition comprising an mRNA encoding IL-12 and mRNA encoding soluble PD-1 in combination with RNAdjuvant (group A according to Table 4) strongly decreased the median tumor volume compared to the other treatments (groups B-D according to Table 4). In addition, the results in FIG. 1B show that the inventive composition comprising an mRNA encoding IL-12 and mRNA encoding soluble PD-1 in combination with RNAdjuvant (group “A” according to Table 4) strongly increased the survival of tumor challenged mice compared to the other treatments (groups B-D according to Table 4).

### Example 2: Treatment with an Immunostimulating RNA (“RNAdjuvant”) in Combination with a Checkpoint Inhibitor Anti PD-1 Antibody

[1268] Table 5 summarizes the treatment as used in the present example. In addition to RNAdjuvant (administered i.t.), a checkpoint inhibitor anti PD-1 (BioXCell) was administered intraperitoneal (i.p.) in CT26 tumor challenged mice, survival rates were analyzed.

TABLE 5
Groups, treatment and RNA dilution/antibody dilution

| | | Construct | Amount | Antibody | |
|---|---|---|---|---|---|
| | No. of | (i.t. | of RNA | (i.p. | Vaccination |
| Group | mice | treatment) | (μg) | treatment) | schedule |
| A | 8 | RiLa | — | — | 2x week |
| B | 8 | RNAdjuvant | 25 | Control Ab | 2x week |
| | | | | (100 μg) | |
| C | 7 | RNAdjuvant | 25 | Anti-PD-1 | 2x week |
| | | | | (200 μg) | |
| D | 6 | RiLa | — | Anti-PD-1 | 2x week |
| | | | | (200 μg) | |

[1269] Tumor Challenge and Administration of the Inventive Composition:

[1270] The tumor challenge was performed according to the previous experiment (see Example 1). Mice were injected according to the indicated scheme shown in Table 5. The results of the experiment are shown in FIG. 2.

[1271] Results:

[1272] FIG. 2 shows that the intratumoral (i.t.) treatment with RNAdjuvant® (R2391) in combination with an i.p. administration of anti PD-1 antibody (Group “C” according to Table 5) resulted in an increase in survival compared to the relevant control group that only received the checkpoint inhibitor anti PD-1 antibody (Group “D” according to Table 5) and in an increase in survival rates compared to the treatment with RNAdjuvant and a control antibody (anti hamster IgG, BioXCell) (Group “B” according to Table 5).

### Example 3: Intratumoral Treatment with an Immunostimulating RNA (“RNAdjuvant”) and an mRNA Encoding CD40 Ligand (CD40L) and an mRNA Encoding IL-12

[1273] Table 6 summarizes the treatment as used in the present example. RNAdjuvant and the mRNA constructs encoding IL-12 and murine CD40L were administered intratumorally (i.t.). In CT26 tumor challenged mice, survival rates were analysed.

TABLE 6
Groups, treatment and RNA dilution

| | No. of | Constructs | Vaccination |
|---|---|---|---|
| Group | mice | (amount of RNA) | schedule |
| A | 10 | RNAdjuvant (50 μg) + | 2x week |
| | | IL-12 (75 μg) + | |
| | | CD40L (75 μg) | |
| B | 10 | RNAdjuvant (100 μg) | 2x week |
| C | 10 | RiLa | 2x week |

[1274] Tumor Challenge and Administration of the Inventive Composition:

[1275] The tumor challenge was performed according to the previous experiments (see Example 1). Mice were injected according to the indicated scheme shown in Table 6. The results of the experiment are shown in FIG. 3.

[1276] Results:

[1277] The results in FIG. 3 show that the inventive composition comprising an mRNA encoding IL-12 and an mRNA encoding CD40L in combination with RNAdjuvant (group A according to Table 6) strongly increased the median survival of tumor challenged mice compared to the other treatments (groups B to C according to Table 6).

### Example 4: Induction of Systemic Anti-Tumoral Memory Response by Combination of Intratumoral Treatment with an Immunostimulating RNA (“RNAdjuvant”) and Systemic Anti-PD-1 Treatment

[1278] Table 7 summarizes the treatment as used in the present example. RNAdjuvant (administered i.t.) and systemic treatment with a checkpoint inhibitor anti PD-1 (BioXCell) was evaluated by performing re-challenge of mice completely eradicating the primary CT-26 tumor after first treatment, survival rates were analyzed.

TABLE 7
Groups, treatment and RNA dilution

| | | Constructs of first |
|---|---|---|
| | | tumor challenge |
| | No. of | (amount of RNA/Ab + |
| Group | mice | route of treatment) |
| A | 7 | RNAdjuvant (100 μg, i.t.) + |
| | | Anti-PD-1 (200 μg, i.p.) |
| B | 3 | RNAdjuvant (100 μg, i.t.) |
| C | 7 | RiLa |

[1279] Tumor Re-Challenge after Administration of the Inventive Composition:

[1280] First tumor challenge was performed by s.c. injection of CT-26 tumor cells on the right flank in Balb/C mice, whereas re-challenge with 1×10⁶ syngeneic CT26 colon carcinoma cells was performed on the left flank at day 113 after first tumor challenge. Challenge of naïve animals served as control. Tumor eradication of the primary tumor was noted in a lower percentage of animals with intratumoral RNAdjuvant alone (3 out of 10 mice) as compared to the combination of systemic anti-PD-1 with intratumoral RNAdjuvant (7 out of 9 mice). The results of the experiment are shown in FIG. 4.

[1281] Results:

[1282] The results in FIG. 4 show that all mice which have eradicated the first tumor were completely protected against the second tumor challenge demonstrating the induction of systemic memory response. Systemic memory response was also induced by intratumoral RNAdjuvant treatment alone. The induction of a systemic memory response is remarkable as no vaccine inducing an adaptive immune response was administered. Therefore administration of the inventive isRNA, particularly in combination with systemic anti-PD-1 treatment, was sufficient to induce a systemic immune response which could not have been expected.

### Example 5: Induction of Systemic Anti-Tumoral Memory Response by Combination of Intratumoral Treatment with an mRNA Encoding CD40 Ligand (CD40L) and an mRNA Encoding IL-12

[1283] Table 8 summarizes the treatment as used in the present example. RNAdjuvant and the mRNA constructs encoding IL-12 and murine CD40L (administered i.t.) were evaluated by performing re-challenge of mice completely eradicating the primary CT-26 tumor after treatment, survival rates were analyzed.

TABLE 8
Groups, treatment and RNA dilution

| | | Constructs of first |
|---|---|---|
| | No. of | tumor challenge |
| Group | mice | (amount of RNA) |
| A | 5 | RNAdjuvant (50 μg) + CD40L |
| | | (75 μg) + IL-12 (75 μg) |
| B | 3 | RNAdjuvant (100 μg) |
| C | 7 | RiLa |

[1284] Tumor Re-Challenge after Administration of the Inventive Composition:

[1285] First tumor challenge was performed by s.c. injection of CT-26 tumor cells on the right flank in Balb/C mice. After intratumorally treatment with RNAdjuvant alone or in combination with an mRNA encoding CD40 ligand (CD40L) and an mRNA encoding IL-12 treatment, re-challenge with 1×10⁶ syngeneic CT26 colon carcinoma cells was performed on the left flank at day 113 after the first tumor challenge. Challenge of naïve animals served as control. Tumor eradication of the primary tumor was noted in a lower percentage of animals with intratumoral RNAdjuvant alone (3 out of 10 mice) as compared to the combination of mRNA encoding CD40 ligand (CD40L) and an mRNA-encoded IL-12 with intratumoral RNAdjuvant (5 out of 10 mice). The results of the experiment are shown in FIG. 5.

[1286] Results:

[1287] The results in FIG. 5 show that all mice which have eradicated the first tumor were completely protected against the second tumor challenge demonstrating the induction of systemic memory response. Systemic memory response was also induced by intratumoral RNAdjuvant treatment alone.

### Example 6: Phase I/II Study of Intratumoral Application of RNAdjuvant (CV8102) in Patients with Advanced Cutaneous Melanoma (cMEL), Cutaneous Squamous Cell Carcinoma (cSCC), Head and Neck Squamous Cell Carcinoma (hnSCC), or Adenoid Cystic Carcinoma (ACC)

[1288] Part 1:

[1289] Phase I, open label, cohort based dose escalation & expansion study of intratumorally administered RNAdjuvant, with or without systemic anti-PD-1 treatment, in patients having advanced cutaneous melanoma (cMEL), cutaneous squamous cell carcinoma (cSCC), head and neck squamous cell carcinoma (hnSCC), or adenoid cystic carcinoma (ACC).

[1290] Intratumoral injection of RNAdjuvant: CV8102 is administered to cutaneous, subcutaneous, or readily accessible lymph node lesions that can be injected using direct visualization or imaging-guidance (ultrasound) as clinically determined.

[1291] Schedule: Patients receive a maximum of 8 intratumoral administrations of CV8102, unless disease progression requiring initiation of next-line therapy or unacceptable toxicity occurs:

[1292] The first 5 administrations are performed in weekly intervals (Days 1, 8, 15, 22, 29). For patients on anti-PD-1 treatment in Cohorts C and D, CV8102 treatment is initiated on a day of anti-PD-1 treatment and will follow the anti-PD-1 treatment schedule after day 29.

[1293] The subsequent 3 administrations of CV8102 are performed with 2-week intervals (Cohorts A and B). For patients on anti-PD-1 treatment in study Cohorts C and D, the administrations of CV8102 after Day 29 follow the anti-PD-1 treatment schedule and are performed on the day of anti-PD-1 administration; i.e., patients on nivolumab receive CV8102 every 2nd week; patients on pembrolizumab receive CV8102 every 3rd week.

[1294] Part A: Dose Escalation of Single Agent RNAdjuvant

[1295] Part A of the study uses a 2 parameter Bayesian logistic regression model with overdose control for dose escalation. Cohorts of at least 1 (starting dose level) or 2 patients (any other dose level) with advanced cMEL, cSCC, hnSCC, or ACC are treated at escalating doses of intratumorally administered RNAdjuvant until identification of the maximum tolerated dose (MTD) and determination of the recommended dose (RD). A minimum of 7 patients should be enrolled in Part A.

[1296] The starting dose in Part A is 25 μg of RNAdjuvant. The further dose levels are listed in Table 9 below.

TABLE 9
Dose levels of RNAdjuvant
Dose Levels evaluated in Part A and C

| Dose Level | RNAdjuvant | No of Patients^{§} |
|---|---|---|
| Level −1 | 25 μg | ≥1 |
| Level 2* | 50 μg | ≥2 |
| Level 3 | 100 μg | ≥2 |
| Level 4 | 150 μg | ≥2 |

*Starting dose level Part A; potential starting dose level Part C, based on review of Part A data
^{§}A minimum of 3 patients will be treated per cohort

[1297] Inclusion Criteria:

[1298] Cohort A:

[1299] Patients with histologically confirmed advanced (unresectable or metastatic) cMEL or cSCC who failed approved standard therapy or for whom no standard therapy is indicated

[1300] Not amenable to surgical resection or locoregional radiation therapy with curative intent

[1301] Progression on/after at least one line of therapy

or

[1302] Histologically confirmed recurrent or metastatic hnSCC

[1303] Not amenable to surgical resection or locoregional radiation therapy with curative intent

[1304] Progression documented radiologically (documentation of a new or progressive lesion on/after at least one line of therapy.

or

[1305] Histologically or cytologically confirmed ACC

[1306] Not amenable to surgical resection or locoregional radiation therapy with curative intent

[1307] Progression documented radiologically; on/after at least one line of therapy

[1308] Part B: Expansion Cohort

[1309] After completion of Part A, patients with advanced cSCC or ACCare enrolled to separate expansion cohorts at the previously defined recommended dose to further characterize the tolerability and safety profile of intratumorally administered RNAdjuvant in these patient populations and to collect preliminary evidence of anti-tumor activity. Part B should enroll up to 10 patients per expansion cohort. Inclusion criteria:

[1310] Cohort B:

[1311] Expansion cohorts B1 and B2

[1312] Patients with histologically confirmed advanced (unresectable/metastatic) cSCC (B1) or ACC (B2) who failed standard therapy or for whom no standard therapy is indicated

[1313] Not amenable to curative locoregional treatments

[1314] Progression on/after at least one line of therapy (radiological documentation required for ACC)

[1315] Part C: Dose Escalation of RNAdjuvant in Combination with Anti-PD-1 Therapy in Patients with Advanced cMEL or HNSCC

[1316] Part C enrolls patients with advanced cMEL or HNSCC currently receiving anti-PD-1 therapy. Patients must have stable disease or slowly progressive disease after at least 12 weeks of anti-PD-1 therapy prior to application of RNAdjuvant. Cohorts of at least 2 patients are treated sequentially at escalating doses of RNAdjuvant. The dose escalation and the determination of the MTD and RCD (“recommended combination dose”) are guided by a 5 parameter bayesian logistic regression model with overdose control.

[1317] Dose escalation in Part C starts as soon as at least 3 doses of RNAdjuvant have been evaluated in Part A. Starting dose in Part C is one dose level below the highest dose level considered tolerable from part A at the time Part C is commenced (see Table 9).

[1318] Inclusion Criteria:

[1319] Cohorts C and D:

[1320] Histologically confirmed advanced (unresectable or metastatic) cMEL in Cohorts C and D1

[1321] Currently receiving standard anti-PD-1 therapy according to the Summary of Product Characteristics (SPC) Stable or slowly progressing disease after at least 12 weeks of anti-PD-1 therapy according to investigator assessment

[1322] Intention to continue current anti-PD-1 therapy due to an assumed clinical benefit by continued anti-PD-1 therapy according to investigators judgement

[1323] Histologically confirmed recurrent or metastatic hnSCC in Cohorts C and D2

[1324] Currently receiving standard anti-PD-1 therapy according to the SPC

[1325] Stable or slowly progressing disease after at least 12 weeks of anti-PD-1 therapy, defined as follows:

[1326] Stable disease according to irRECIST

[1327] Intention to continue current anti-PD-1 therapy due to an assumed clinical benefit according to investigators judgement

[1328] Part D: Expansion Cohort of RNAdjuvant in Combination with Anti-PD-1 Therapy in Patients with Advanced cMEL or HNSCC.

[1329] Once the RCD (“recommended combination dose”) has been established in Part C, the expansion Part D enrolls additional patients with advanced cMEL or HNSCC on treatment with a PD-1 antagonist (refer to eligibility requirements Part C) to further characterize the tolerability and the safety profile and to evaluate the anti-tumor activity of the combination therapy. Part D should enroll about 21 patients.

[1330] Part 2 (May Alternatively be Performed as Separate Clinical Trial)

[1331] Phase I, open label, cohort based dose escalation & expansion study of intratumorally administered RNAdjuvant and RNArt with or without systemic anti-PD-1 treatment in patients advanced malignant melanoma, squamous cell carcinoma of the skin (SCCs), adenocystic carcinoma (ACC), cutaneous T-cell lymphoma, or squamous cell carcinoma of the head and neck (HNSCC).

[1332] In Part 2 of the phase I clinical trial, Part 1 is repeated, but a fixed dose combination of RNArt and RNAdjuvant is investigated. Dose escalation methodology and cohort definitions including clinical indications are similar to Part 1. Please refer to the previous section for details.

[1333] However, for Part 2, information gained from Part 1 is considered that may lead to a change of the study design of Part 1 and/or 2. RNArt comprises 3 compounds based on optimized RNA that encodes IL-12, PD-1 decoy receptor and CD-40L.

### Example 7: Intratumoral Treatment with an Immunostimulating RNA (“RNAdjuvant”) and an mRNA Encoding CD40 Ligand (CD40L) and mRNA Encoding Soluble PD1 (solPD1) in Combination with a Checkpoint Inhibitor Anti CTLA-4 Antibody

[1334] Table 10 summarizes the treatment as used in the present example. RNAdjuvant and an mRNA encoding soluble PD1 and CD40L in combination with a checkpoint inhibitor anti-CTLA4 antibody (BioXcell, clone 9H10) were administered intratumorally (i.t.) in CT26 tumor challenged mice, median tumor growth were analyzed.

TABLE 10
Groups, treatment and RNA dilution/antibody dilution

| | RNAdjuvant | RNArt | anti-CTLA4 | |
|---|---|---|---|---|
| | (i.t.) | (i.t.) | (i.t) | No. of |
| Group | (25 μg) | (25μg) | (50 μg) | mice |
| A | RNAdjuvant | solPD1 + CD40L | anti-CTLA4 | 10 |
| B | RNAdjuvant | IL12 + solPD1 + CD40L | | 10 |
| C | Buffer | | | 9 |

[1335] Tumor Challenge and Administration of the Inventive Composition:

[1336] The tumor challenge was performed according to the previous experiments (see Example 1). Mice were injected according to the indicated scheme shown in Table 10. The results of the experiment are shown in FIG. 6.

[1337] Results:

[1338] The results in FIG. 6 show that the inventive composition comprising RNAdjuvant and an mRNA encoding soluble PD1 and CD40L in combination with a checkpoint inhibitor anti-CTLA4 antibody (group A according to Table 10) strongly decreased the median tumor volume.

### Example 8: Abscopal Effect of Intratumoral Treatment with an Immunostimulating RNA (RNAdjuvant) and an mRNA Encoding CD40 Ligand (CD40L) and mRNA Encoding Soluble PD1 (solPD1) in Combination with a Checkpoint Inhibitor Anti CTLA-4 Antibody

[1339] Tumor Challenge and Administration of the Inventive Composition:

[1340] Balb/c mice were injected subcutaneously (s.c.) with 1×10⁶ CT26 cells (colon carcinoma cell line) per mouse (in a volume of 100 μl PBS) on the right flank on day 0 of the experiment. On day 5 of the experiment mice were injected subcutaneously (s.c.) with 1×10⁶ CT26 cells (in a volume of 100 μl PBS) on the left flank to observe an abscopal effect (effect on the untreated tumor) of the inventive composition. Table 10 of Example 7 summarizes the treatment as used in the present example. RNAdjuvant and an mRNA encoding soluble PD1 and CD40L in combination with an anti-CTLA4 checkpoint inhibitor were administered intratumorally (i.t.) in CT26 tumor bearing mice (right flank), median tumor growth of the untreated tumor (left flank) were analyzed.

[1341] Mice were injected according to the indicated scheme shown in Table 10 of Example 7. Median tumor growth of the untreated tumor (left flank) was analyzed. Results of the experiment are shown in FIG. 7.

[1342] Results:

[1343] Intratumoral treatment of one lesion with anti-CTLA4 antibody in combination with RNAdjuvant, mRNA encoding soluble PD1 and mRNA encoding CD40 ligand induces a systemic effect and inhibits tumor growth of the untreated tumor.

### Example 9: Intratumoral Treatment with an Immunostimulating RNA (RNAdjuvant) and mRNA Encoding CD40 Ligand (CD40L), mRNA Encoding IL12, mRNA Encoding Soluble PD1 (solPD1) and Anti-CTLA4 Antibody in Combination with Anti-PD1 Antibody (Administered i.p.)

[1344] Tumor Challenge and Administration of the Inventive Composition:

[1345] The tumor challenge is performed according to the previous experiments (see Example 1). Mice are injected according to the indicated scheme shown in Table 11.

[1346] Table 11 summarizes the treatment as use in the present example. RNAdjuvant and an mRNA encoding CD40L, mRNA encoding soluble PD1, mRNA encoding IL12, mRNA encoding CD40L and mRNA encoding the checkpoint inhibitor anti-CTLA4 antibody are administered intratumorally (i.t.) in combination with checkpoint inhibitor anti PD1 antibody in CT26 tumor challenged mice, median tumor growth and survival rates are analyzed.

TABLE 11
Groups, treatment and RNA dilution/antibody dilution

| Group | RNAdjuvant (i.t.) | RNArt (i.t.) | anti-CTLA4 (i.t.) | anti-PD1 (i.p.) | No. of mice |
|---|---|---|---|---|---|
| 1 | RNAdjuvant | IL12 + CD40L | anti-CTLA4 | anti-PD1 | 10 |
| 3 | RNAdjuvant | IL12 + CD40L + solPD1 | anti-CTLA4 | | 10 |
| 2 | RNAdjuvant | IL12 + CD40L | anti-CTLA4 | | 10 |
| 4 | RNAdjuvant | IL12 + CD40L | | anti-PD1 | 10 |
| 5 | RNAdjuvant | IL12 + CD40L + solPD1 | | | 10 |
| 6 | RNAdjuvant | IL12 + CD40L | | | 10 |
| 7 | | | anti-CTLA4 | anti-PD1 | 10 |
| 8 | | | anti-CTLA4 | | 10 |
| 9 | | | | anti-PD1 | 10 |
| 10 | Puffer | | | | 8 |

### Example 10: Intratumoral Treatment with an Immunostimulating RNA (RNAdjuvant) and an mRNA Encoding for an Antigen (RNActive) Administered Intradermally (i.d.) in Combination with Anti-PD1 Antibody (Administered i.p.)

[1347] C57BL/6 mice were inoculated s.c. with 3×10⁵ E.G7-OVA tumor cells in the right flank. Treatment was start at a mean tumor size of 30 mm³. Mice were treated i.t. with immunostimulatory RNAdjuvant and vaccinated i.d. with OVA RNActive (mRNA encoding ovalbumine) in combination with an anti PD1 antibody (administered i.p.). mRNA encoding Photinus pyralis Luciferase (PpLuc) or buffer were used as unspecific control. On days 7, 11, 14, 17, and 20 of the experiment mice were treated according to Table 12 below. Median tumor growth and survival rates were analyzed.

TABLE 12
Groups, treatment and RNA dilution/antibody dilution

| | | Anti-PD1 | RNAdjuvant | RNActive |
|---|---|---|---|---|
| | No. of | (i.p.) | (i.t.) | (i.d.) |
| Group | mice | (200 μg) | (25 μg) | (32 μg) |
| A | 10 | Anti-PD1 | RNAdjuvant | OVA |
| B | 10 | Anti-PD1 | RNAdjuvant | |
| C | 10 | | | OVA |
| D | 10 | | PpLuc | PpLuc |
| E | 10 | | Buffer | Buffer |

[1348] Tumor Challenge and Administration of the Inventive Composition:

[1349] Mice were injected according to the indicated scheme shown in Table 12. The results of the experiment are shown in FIG. 8.

[1350] Results:

[1351] The results in FIG. 8 show that the immunostimulatory RNA (RNAdjuvant) administered i.t. in combination with mRNA encoding the tumor antigen ovalbumine (OVA) and in combination with an anti PD1 antibody strongly decreased the tumor growth compared to the other treatments (groups B-E according to Table 12). Remarkably, the results in FIG. 8 show that the immunostimulatory RNAdjuvant in combination with a checkpoint inhibitor PD1 antibody and mRNA vaccination (OVA, administered i.d.) induced complete tumor remission and significantly increased the survival of tumor challenged mice compared to the other treatments (groups B-E according to Table 13).

### Example 11: Intratumoral Treatment with an Immunostimulating RNA (RNAdjuvant) and an mRNA Encoding IL12 Administered i.t. in Combination with an mRNA Encoding an Antigen (RNActive) Administered i.d.

[1352] C57BL/6 mice were inoculated s.c. with 3×105 E.G7-OVA tumor cells in the right flank. Treatment was started at a mean tumor size of 30 mm³. Mice were treated i.t. with immunostimulatory RNAdjuvant and vaccinated i.d. with mRNA encoding the tumor antigen ovalbumine (OVA RNActive) in combination with an mRNA encoding IL12 (administered i.t.). mRNA encoding Photinus pyralis luciferase (PpLuc RNActive) or buffer were used as unspecific control. On days 7, 11, 14, 17, and 20 of the experiment mice were treated according to Table 13 below. Median tumor growth and survival rates were analyzed.

TABLE 13
Groups, treatment and RNA dilution

| | | RNAdjuvant | RNArt | RNActive |
|---|---|---|---|---|
| | No. of | (i.t.) | (i.t.) | (i.d.) |
| Group | mice | 25 μg | 25 μg | 32 μg |
| A | 10 | RNAdjuvant | IL12 | OVA |
| B | 10 | RNAdjuvant | IL12 | |
| C | 10 | | | OVA |
| D | 10 | | PpLuc | PpLuc |
| E | 10 | | Buffer | Buffer |

[1353] Tumor Challenge and Administration of the Inventive Composition:

[1354] Mice were injected according to the indicated scheme shown in Table 13. The results of the experiment are shown in FIG. 9.

[1355] Results:

[1356] The results in FIG. 9 show that intratumoral treatment with immunostimulatory RNA (RNAdjuvant) and an mRNA encoding IL12 in combination with intradermal vaccination with OVA RNActive strongly decreased the median tumor volume compared to the other treatments (groups B-E according to Table 13). In addition, the results in FIG. 9 show that the inventive composition comprising an immunostimulatory RNA (RNAdjuvant) and an mRNA encoding IL12 combined with mRNA vaccination (OVA RNActive) strongly increased the survival of tumor challenged mice compared to the other treatments (groups B-E according to Table 13).

### Example 12: Phase I/II Study of Intratumoral Application of RNAdjuvant (CV8102) in Patients with Advanced Cutaneous Melanoma (cMEL), Cutaneous Squamous Cell Carcinoma (cSCC), Head and Neck Squamous Cell Carcinoma (hnSCC), Adenoid Cystic Carcinoma (ACC), Vulvar Squamous Cell Carcinoma (VSCC), or Cutaneous T-Cell Lymphoma, Mycosis Fungoides Subtype (CTCL-MF)

[1357] Part 1:

[1358] Phase I, open label, cohort based dose escalation & expansion study of intratumorally administered RNAdjuvant, with or without systemic anti-PD-1 treatment, in patients having advanced cutaneous melanoma (cMEL), cutaneous squamous cell carcinoma (cSCC), head and neck squamous cell carcinoma (hnSCC), adenoid cystic carcinoma (ACC), vulvar squamous cell carcinoma (VSCC), or cutaneous T-cell lymphoma, mycosis fungoides subtype (CTCL-MF).

[1359] Intratumoral injection of RNAdjuvant: CV8102 is administered to cutaneous, subcutaneous, or readily accessible lymph node lesions that can be injected using direct visualization or imaging-guidance (ultrasound) as clinically determined.

[1360] Schedule: Patients receive a maximum of 8 intratumoral administrations of CV8102, unless disease progression requiring initiation of next-line therapy or unacceptable toxicity occurs:

[1361] The first 5 administrations are performed in weekly intervals (Days 1, 8, 15, 22, 29). For patients on anti-PD-1 treatment in Cohorts C and D, CV8102 treatment is initiated on a day of anti-PD-1 treatment and will follow the anti-PD-1 treatment schedule after day 29.

[1362] The subsequent 3 administrations of CV8102 are performed with 2-week intervals (Cohorts A and B). For patients on anti-PD-1 treatment in study Cohorts C and D, the administrations of CV8102 after Day 29 follow the anti-PD-1 treatment schedule and are performed on the day of anti-PD-1 administration; i.e., patients on nivolumab receive CV8102 every 2nd week; patients on pembrolizumab receive CV8102 every 3rd week.

[1363] Part A: Dose Escalation of Single Agent RNAdjuvant

[1364] Part A of the study uses a 2 parameter Bayesian logistic regression model with overdose control for dose escalation. Cohorts of at least 1 (starting dose level) or 2 patients (any other dose level) with advanced cMEL, cSCC, hnSCC, or ACC are treated at escalating doses of intratumorally administered RNAdjuvant until identification of the maximum tolerated dose (MTD) and determination of the recommended dose (RD). A minimum of 7 patients should be enrolled in Part A.

[1365] The starting dose in Part A is 25 μg of RNAdjuvant. The further dose levels are listed in Table 14 below.

TABLE 14
Dose levels of RNAdjuvant
Dose Levels evaluated in Part A and C

| Dose Level | RNAdjuvant | No of Patients^{§} |
|---|---|---|
| Level −1 | 25 μg | ≥1 |
| Level 2 | 50 μg | ≥2 |
| Level 3 | 100 μg | ≥2 |
| Level 4 | 150 μg | ≥2 |

^{§}A minimum of 2 patients will be treated per cohort

[1366] Inclusion Criteria:

[1367] Cohort A:

[1368] Patients with histologically confirmed advanced (unresectable or metastatic) cMEL or cSCC who failed approved standard therapy or for whom no standard therapy is indicated

[1369] Not amenable to surgical resection or locoregional radiation therapy with curative intent

[1370] Progression on/after at least one line of therapy

or

[1371] Histologically confirmed recurrent or metastatic hnSCC

[1372] Not amenable to surgical resection or locoregional radiation therapy with curative intent

[1373] Progression documented radiologically (documentation of a new or progressive lesion on/after at least one line of therapy.

or

[1374] Histologically or cytologically confirmed ACC

[1375] Not amenable to surgical resection or locoregional radiation therapy with curative intent

[1376] Progression documented radiologically; on/after at least one line of therapy

or

[1377] Histologically confirmed recurrent or metastatic VSCC

[1378] Not amenable to surgery, radio- or radiochemotherapy with curative intent

[1379] Not a candidate for standard systemic therapies

or

[1380] Relapsed or refractory CTCL, mycosis fungoides (MF) subtype

[1381] Diagnosis based upon standard staging classification system

[1382] MF without CD30⁺ large cell transformation and no evidence of visceral involvement

[1383] Relapsed, refractory or progressed after at least one prior treatment

[1384] Part B: Expansion Cohort

[1385] After completion of Part A, patients with advanced cSCC, ACC, VSCC, or CTCL-MF are enrolled to separate expansion cohorts at the previously defined recommended dose to further characterize the tolerability and safety profile of intratumorally administered RNAdjuvant in these patient populations and to collect preliminary evidence of anti-tumor activity. Part B should enroll up to 10 patients per expansion cohort. Inclusion criteria:

[1386] Cohort B:

[1387] Expansion cohorts B1, B2

[1388] Patients with histologically confirmed advanced (unresectable/metastatic) cSCC (B1) or ACC (B2) who failed standard therapy or for whom no standard therapy is indicated

[1389] Not amenable to curative locoregional treatments

[1390] Progression on/after at least one line of therapy (radiological documentation required for ACC)

[1391] Expansion cohort B3

[1392] Histologically confirmed recurrent or metastatic VSCC

[1393] Not amenable to surgery, radio- or radiochemotherapy with curative intent

[1394] Not a candidate for standard systemic therapies

[1395] Expansion cohort B4

[1396] Relapsed or refractory CTCL, mycosis fungoides (MF) subtype

[1397] Diagnosis based upon standard staging classification system

[1398] MF without CD30⁺ large cell transformation and no evidence of visceral involvement

[1399] Relapsed, refractory or progressed after at least one prior treatment

[1400] Part C: Dose Escalation of RNAdjuvant in Combination with Anti-PD-1 Therapy in Patients with Advanced cMEL or HNSCC

[1401] Part C enrolls patients with advanced cMEL or HNSCC currently receiving anti-PD-1 therapy. Patients must have stable disease or slowly progressive disease after at least 12 weeks of anti-PD-1 therapy prior to application of RNAdjuvant. Cohorts of at least 2 patients are treated sequentially at escalating doses of RNAdjuvant. The dose escalation and the determination of the MTD and RCD (“recommended combination dose”) are guided by a 5 parameter bayesian logistic regression model with overdose control.

[1402] Dose escalation in Part C starts as soon as at least 3 doses of RNAdjuvant have been evaluated in Part A. Starting dose in Part C is 25 μg (see Table 14).

[1403] Inclusion Criteria:

[1404] Cohorts C and D:

[1405] Histologically confirmed advanced (unresectable or metastatic) cMEL in Cohorts C and D1

[1406] Currently receiving standard anti-PD-1 therapy according to the Summary of Product Characteristics (SPC)

[1407] Stable or slowly progressing disease after at least 12 weeks of anti-PD-1 therapy according to investigator assessment

[1408] Intention to continue current anti-PD-1 therapy due to an assumed clinical benefit by continued anti-PD-1 therapy according to investigators judgement

[1409] Histologically confirmed recurrent or metastatic hnSCC in Cohorts C and D2

[1410] Currently receiving standard anti-PD-1 therapy according to the SPC

[1411] Stable or slowly progressing disease after at least 12 weeks of anti-PD-1 therapy, defined as follows:

[1412] Stable disease according to irRECIST

[1413] Stable disease requires a less than or equal 5% decrease in disease (defined as ≤5% regression in measurable dimension of disease) during an interval of at least 12 weeks prior to Day 1

[1414] Intention to continue current anti-PD-1 therapy due to an assumed clinical benefit according to investigators judgement

[1415] Part D: Expansion Cohort of RNAdjuvant in Combination with Anti-PD-1 Therapy in Patients with Advanced cMEL or HNSCC.

[1416] Once the RCD (“recommended combination dose”) has been established in Part C, the expansion Part D enrolls additional patients with advanced cMEL or HNSCC on treatment with a PD-1 antagonist (refer to eligibility requirements Part C) to further characterize the tolerability and the safety profile and to evaluate the anti-tumor activity of the combination therapy. Part D should enroll about 21 patients.

[1417] Part 2 (Will be Performed as Separate Clinical Trial)

[1418] Phase I, open label, cohort based dose escalation & expansion study of intratumorally administered RNAdjuvant and RNArt with or without systemic anti-PD-1 treatment in patients percutaneously accessible solid tumors or lymphoma.

[1419] Basically, the design of the phase I clinical trial of RNArt+RNAdjuvant corresponds to the design of the Phase I study of RNAdjuvant (Part 1). The range of tolerated dose combinations will first be investigated using a dose-escalation procedure (cohort A). RNart, comprising 5 RNA compounds encoding IL-12, CD40L, soluble PD-1 an the two chains of anti-CTLA-4, will be increased stepwise while RNAdjuvant will be kept at fixed dose of 25 μg. RNArt and RNAdjuvant will be given simultaneously to the same tumor lesion. Dose escalation methodology is similar to Part 1, Cohort A (Bayesian dose-escalation approach). The administration schedule corresponds to the schedule of RNAdjuvant described above (i.e 5× weekly followed by 3 addition injections Q2W).

[1420] The dose escalation part (Cohort A) includes the indications listed in Part 1, plus the following additional indications:

[1421] Patients with

[1422] Human Papilloma virus related advanced tumors, including advanced, recurrent or metastatic vulvar squamous cell carcinoma, cervical cancer, or vaginal cancer

[1423] Not amenable to surgery, radio- or radiochemotherapy with curative intent

[1424] Not a candidate for standard systemic therapies

or

[1425] Follicular low-grade Non-Hodgkin's lymphoma

[1426] Either treatment naïve or relapsed or refractory following at least one prior treatment

[1427] Not requiring active therapy (asymptomatic, watchful waiting patients)

or

[1428] Nodal marginal zone B cell lymphoma

[1429] Either treatment naïve or relapsed or refractory following at least one prior treatment

[1430] Not requiring active therapy (asymptomatic, watchful waiting patients)

or

[1431] Primary cutaneous anaplastic large-cell lymphoma

[1432] Relapsed, refractory or progressed after at least one prior treatment or for whom no other therapy options are available

or

[1433] Histologically confirmed advanced, recurrent or metastatic adult soft tissue sarcoma

[1434] Not amenable to surgery or other treatment options with curative intent

[1435] At least one line of prior systemic therapy or sarcoma histological subtypes for which there is no known standard systemic therapy

or

[1436] Histologically confirmed advanced (unresectable or metastatic) basal cell carcinoma of the skin

[1437] Not amendable to surgery of any other treatment options with curative intent

[1438] Not a candidate for systemic therapy

[1439] Cohort B: Expansion Cohort

[1440] For indications please refer to Part 1, Expansion cohort B

[1441] Cohort C: Dose Escalation of RNart+RNAdjuvant in Combination with Anti-PD-1 Therapy in Patients with Advanced cMEL, HNSCC or cSCC

[1442] As in the Phase I study with RNAdjuvant, Part C enrolls patients with advanced cMEL or HNSCC. Depending on whether an anti-PD-1 antibody will be approved for treatment of advanced cSCC at the time of start of Cohort C, patients with cSCC will be also enrolled into this cohort. Patients must have stable disease or slowly progressive disease after at least 12 weeks of anti-PD-1 therapy prior to application of RNArt+RNAdjuvant. RNart, comprising 4 RNA compounds encoding IL-12, CD40L and the two chains of anti-CTLA-4, will be increased stepwise while RNAdjuvant will be kept at fixed dose of 25 μg. For the dose escalation methodology please refer to Part 1, Cohort C.

[1443] Inclusion Criteria:

[1444] Cohorts C and D:

[1445] Include the indications listed in Part 1, Cohorts C and D. Depending on the approval status of anti-PD-1 antibodies, the following patients will be enrolled to these cohorts:

[1446] Histologically confirmed advanced (unresectable or metastatic) cSCC

[1447] Currently receiving standard anti-PD-1 therapy according to the Summary of Product Characteristics (SPC)

[1448] Stable or slowly progressing disease after at least 12 weeks of anti-PD-1 therapy according to investigator assessment

[1449] Intention to continue current anti-PD-1 therapy due to an assumed clinical benefit by continued anti-PD-1 therapy according to investigators judgement

### Experiment 13: Expression of Single RNArt Constructs in A375 Human Melanoma Cells

[1450] A375 cells were seeded in 24-well plates at a density of 50 000 cells/well. After 24 hours cells were transfected with the indicated amounts of RNA and lipofectamine 2000 (Invitrogen) in a constant RNA:lipofectamine ratio of 1:2. After 5 hours the supernatants were collected and 1 ml fresh medium was added. After further 24 hours of incubation supernatants were again collected. Translated mRNA Products of IL12, solPD1 and anti-CTLA4 antibody were measured in the supernatant.

[1451] Human IL12 content in the supernatants was measured with the Human IL-12p70 DuoSet Kit, R&D Systems, Cat: DY1270 according to the manufacturer's protocol using 1:10, 1:100 and 1:1000 dilutions of the supernatants (see FIG. 10).

[1452] Human PD1 ELISA is done in duplicates with the Human PD1 DuoSet Kit, R&D Systems, Cat: DY1086, according to the manufacturer's protocol using 1:10, 1:100 and 1:1000 dilutions of the supernatants (see FIG. 11).

[1453] Human anti-CTLA4 IgG1 ELISA is done in duplicates with Rituximab Antibody for standard (Goat Anti-Human IgG (SouthernBiotech Cat.No: 2044-01, c=1 mg/ml, 1:1000) and Goat Anti-Human IgG Biotin (Dianova Cat.No: 109065088-01, 1:20000) using 1:10, 1:100 and 1:1000 dilutions of the supernatants (see FIG. 12).

[1454] For detection of membrane bound CD40LG protein A375 cells were seeded in 6-well plates at a density of 130 000 cells/well. After 24 hours cells were transfected with the indicated amounts of RNA and lipofectamine 2000 (Invitrogen) in a constant RNA:lipofectamine ratio of 1:2. After 24 hours of incubation cells were collected and cell surface staining was done with CD154 anti-human APC (BD Pharmingen). Finally cell surface expression of CD40LG was analyzed by flow cytometry (see FIG. 13).

TABLE 15
RNA constructs

| | | SEQ ID |
|---|---|---|
| RNA | Description | NO: |
| R2025 | Non-coding immunostimulatory RNA | 433 |
| | (RNAdjuvant) | |
| R5448/R5939 | mRNA encoding human IL-12 | 598 |
| | (hIL-12 (GC)) | |
| R5447/R5938 | mRNA encoding human soluble PD-1 | 597 |
| | (human solPD1 (GC)) | |
| R5446/R5990 | mRNA encoding human CD40LG | 596 |
| | (CD40LG (GC)) | |
| R5417 | mRNA encoding heavy chain (HC) of | 594 |
| | anti-CTLA4 antibody | |
| | (HC anit-CTLA4 Ab (GC)) | |
| R5418 | mRNA encoding light chain (LC) of | 595 |
| | anti-CTLA4 antibody | |
| | (HLC anit-CTLA4 Ab (GC)) | |

1. Immunostimulatory RNA (isRNA) for use in the treatment or prophylaxis of a tumor or cancer disease selected from the group consisting of cutaneous melanoma (cMEL), cutaneous squamous cell carcinoma (cSCC), head and neck squamous cell carcinoma (HNSCC), adenoid cystic carcinoma (ACC), cutaneous T-cell lymphoma, preferably cutaneous T-cell lymphoma of mycosis fungoides subtype, and vulvar squamous cell cancer (VSCC), wherein the tumor or the cancer disease is preferably at an advanced stage and/or refractory to standard therapy.

2. The isRNA for use according to claim 1, wherein the isRNA is administered intratumorally.

3. The isRNA for use according to claim 2, wherein the isRNA is administered by injection.

4. The isRNA for use according to any of the preceding claims, wherein the isRNA is a non-coding RNA.

5. The isRNA for use according to any of the preceding claims, wherein the isRNA comprises
a nucleic acid sequence according to
(GₗXₘGₙ), formula (I)
wherein:
G is guanosine (guanine), uridine (uracil) or an analogue of guanosine (guanine) or uridine (uracil);
X is guanosine (guanine), (uridine) uracil, adenosine (adenine), thymidine (thymine), cytidine (cytosine) or an analogue of the above-mentioned nucleotides (nucleosides);
l is an integer from 1 to 40,
wherein
when l=1 G is guanosine (guanine) or an analogue thereof,
when l>1 at least 50% of the nucleotides (nucleosides) are guanosine (guanine) or an analogue thereof;
m is an integer and is at least 3;
wherein
when m=3 X is uridine (uracil) or an analogue thereof,
when m>3 at least 3 successive uridines (uracils) or analogues of uridine (uracil) occur;
n is an integer from 1 to 40,
wherein
when n=1 G is guanosine (guanine) or an analogue thereof,
when n>1 at least 50% of the nucleotides (nucleosides) are guanosine (guanine) or an analogue thereof;
a nucleic acid sequence according to
(NᵤGₗXₘGₙNᵥ)ₐ formula (III)
wherein:
G is guanosine (guanine), uridine (uracil) or an analogue of guanosine (guanine) or uridine (uracil), preferably guanosine (guanine) or an analogue thereof;
X is guanosine (guanine), uridine (uracil), adenosine (adenine), thymidine (thymine), cytidine (cytosine), or an analogue of these nucleotides (nucleosides), preferably uridine (uracil) or an analogue thereof;
N is a nucleic acid sequence having a length of about 4 to 50, preferably of about 4 to 40, more preferably of about 4 to 30 or 4 to 20 nucleic acids, each N independently being selected from guanosine (guanine), uridine (uracil), adenosine (adenine), thymidine (thymine), cytidine (cytosine) or an analogue of these nucleotides (nucleosides);
a is an integer from 1 to 20, preferably from 1 to 15, most preferably from 1 to 10;
l is an integer from 1 to 40,
wherein when l=1, G is guanosine (guanine) or an analogue thereof,
when l>1, at least 50% of these nucleotides (nucleosides) are guanosine (guanine) or an analogue thereof;
m is an integer and is at least 3;
wherein when m=3, X is uridine (uracil) or an analogue thereof, and
when m>3, at least 3 successive uridines (uracils) or analogues of uridine (uracil) occur;
n is an integer from 1 to 40,
wherein when n=1, G is guanosine (guanine) or an analogue thereof,
when n>1, at least 50% of these nucleotides (nucleosides) are guanosine (guanine) or an analogue thereof;
u,v may be independently from each other an integer from 0 to 50,
preferably wherein when u=0, v≥1, or when v=0, u≥1;
wherein the nucleic acid molecule of formula (III) has a length of at least 50 nucleotides, preferably of at least 100 nucleotides, more preferably of at least 150 nucleotides, even more preferably of at least 200 nucleotides and most preferably of at least 250 nucleotides; and/or

6. The isRNA for use according to any of the preceding claims, wherein the isRNA comprises at least one nucleic acid sequence according to any one of SEQ ID NOs: 433 to 437, 1014 to 1016, or a fragment or variant of any of these nucleic acid sequences.

7. The isRNA for use according to any of the preceding claims, wherein the isRNA is complexed with a cationic or polycationic compound, preferably with a cationic or polycationic polymer, a cationic or polycationic peptide or protein, a cationic or polycationic polysaccharide and/or a cationic or polycationic lipid.

8. The isRNA for use according to claim 7, wherein the cationic or polycationic compound is a polymeric carrier.

9. The isRNA for use according to claim 8, wherein the polymeric carrier is formed by a disulfide-crosslinked cationic component, preferably a disulfide-crosslinked cationic peptide, wherein the disulfide-crosslinked cationic peptide preferably comprises
a peptide according to formula V
(Arg)ₗ;(Lys)ₘ;(His)ₙ;(Orn)ₒ;(Xaa)ₓ, (formula (V),
wherein l+m+n+o+x=8-15, and l, m, n or o independently of each other may be any number selected from 0, 1, 2, 3, 4, 5, 6, 7, 8, 9, 10, 11, 12, 13, 14 or 15, provided that the overall content of Arg, Lys, His and Orn represents at least 50% of all amino acids of the oligopeptide; and Xaa may be any amino acid selected from native (=naturally occurring) or non-native amino acids except of Arg, Lys, His or Orn; and x may be any number selected from 0, 1, 2, 3 or 4, provided, that the overall content of Xaa does not exceed 50% of all amino acids of the oligopeptide;
a peptide according to formula Va
{(Arg)ₗ;(Lys)ₘ;(His)ₙ;(Orn)ₒ;(Xaa′)ₓ(Cys)_{y}} formula (Va),
wherein (Arg)ₗ; (Lys)ₘ; (His)ₙ; (Orn)ₒ; and x are as defined for formula V, Xaa′ is any amino acid selected from native (=naturally occurring) or non-native amino acids except of Arg, Lys, His, Orn or Cys and y is any number selected from 0, 1, 2, 3, 4, 5, 6, 7, 8, 9, 10, 11, 12, 13, 14, 15, 16, 17, 18, 19, 20, 21-30, 31-40, 41-50, 51-60, 61-70, 71-80 and 81-90, provided that the overall content of Arg (Arginine), Lys (Lysine), His (Histidine) and Orn (Ornithine) represents at least 10% of all amino acids of the oligopeptide;
a peptide according to formula Vb
Cys1{(Arg)ₗ;(Lys)ₘ;(His)ₙ;(Orn)ₒ;(Xaa)ₓ}Cys2 formula (Vb)
wherein empirical formula {(Arg)ₗ; (Lys)ₘ; (His)ₙ; (Orn)ₒ; (Xaa)ₓ} is as defined for formula (V) and forms a core of an amino acid sequence according to (semiempirical) formula (V) and wherein Cys1 and Cys2 are cysteines proximal to, or terminal to (Arg)ₗ; (Lys)ₘ; (His)ₙ; (Orn)ₒ; (Xaa)ₓ; and/or

10. The isRNA for use according to claim 8 or 9, wherein the polymeric carrier comprises at least one of the disulfide-crosslinked cationic peptides Cys-Arg₁₂ or Cys-Arg₁₂-Cys.

11. The isRNA for use according to any of claims 7 to 10, wherein the N/P ratio of the isRNA to the cationic or polycationic compound, preferably the cationic or polycationic peptide or protein, is in the range of about 0.1 to 10, including a range of about 0.3 to 4, of about 0.5 to 2, of about 0.7 to 2 and of about 0.7 to 1.5.

12. The isRNA for use according to any of the preceding claims, wherein the isRNA is complexed with one or more lipids, thereby forming liposomes, lipid nanoparticles and/or lipoplexes.

13. The isRNA for use according to any of the preceding claims, wherein the treatment comprises administration of at least one additional pharmaceutically active ingredient.

14. The isRNA for use according to claim 13, wherein the at least one additional pharmaceutically active ingredient is a compound that is used in the treatment of a tumor or cancer disease preferably selected from the group consisting of cutaneous melanoma (cMEL), cutaneous squamous cell carcinoma (cSCC), head and neck squamous cell carcinoma (HNSCC), adenoid cystic carcinoma (ACC), cutaneous T-cell lymphoma, preferably cutaneous T-cell lymphoma of mycosis fungoides subtype, and vulvar squamous cell cancer (VSCC), wherein the tumor or the cancer disease is preferably at an advanced stage and/or refractory to standard therapy.

15. The isRNA for use according to claim 13 or 14, wherein the at least one additional pharmaceutically active ingredient is a checkpoint modulator or a fragment or variant thereof.

16. The isRNA for use according to claim 15, wherein the checkpoint modulator is selected from the group consisting of a PD-1 inhibitor, a PD-L1 inhibitor, a CTLA-4 inhibitor, a LAG3 inhibitor, a TIM3 inhibitor, a TIGIT-inhibitor an OX40 stimulator, a 4-1BB stimulator, a CD40L stimulator, a CD28 stimulator and a GITR stimulator, or a fragment or variant of any of these checkpoint modulators.

17. The isRNA for use according to claim 16, wherein the checkpoint modulator is a PD-1 inhibitor or a PD-L1 inhibitor, wherein the PD-1 inhibitor is preferably an antagonistic antibody directed against PD-1 and the PD-L1 inhibitor is preferably an antagonistic antibody directed against PD-L1, or a fragment or variant of said antibody.

18. The isRNA for use according to claim 16, wherein the checkpoint modulator is a CTLA-4 inhibitor, preferably an antagonistic antibody directed against CTLA4, or a fragment or variant thereof.

19. The isRNA for use according to claim 13 or 14, wherein the at least one additional pharmaceutically active ingredient is an interleukin, preferably IL-12, or a fragment or variant thereof.

20. The isRNA for use according to any of claims 1 to 19, wherein the treatment comprises administration of at least one coding RNA, preferably at least one mRNA.

21. The isRNA for use according to claim 20, wherein the at least one coding RNA comprises at least one coding sequence encoding at least one peptide or protein comprising at least one peptide or protein selected from the group consisting of
IL-12,
CD40L,
a decoy PD-1 receptor, and
an antagonistic antibody directed against CTLA4,
or a fragment or variant of any of these.

22. The isRNA for use according to claim 20 or 21, wherein the at least one coding RNA comprises at least one coding sequence encoding a peptide or protein comprising IL-12 or a fragment or variant thereof.

23. The isRNA for use according to claim 20 or 21, wherein the at least one coding RNA comprises at least one coding sequence encoding a peptide or protein comprising CD40L or a CD40L analogue or a fragment or variant thereof.

24. The isRNA for use according to claim 209 or 21, wherein the at least one coding RNA comprises at least one coding sequence encoding a peptide or protein comprising a decoy PD-1 receptor or a PD-1 decoy receptor analogue or a fragment or variant thereof.

25. The isRNA for use according to claim 20 or 21, wherein the at least one coding RNA comprises at least one coding sequence encoding a peptide or protein comprising an antagonistic antibody directed against CTLA4, or an analogue or a fragment or variant thereof.

26. The isRNA for use according to claim 20 or 21, wherein
the at least one coding RNA comprises at least one coding sequence encoding a peptide or protein comprising IL-12 or a fragment or variant thereof,
the same or a different coding RNA comprises at least one coding sequence encoding a peptide or protein comprising CD40L or a fragment or variant thereof,
the same or a different coding RNA comprises at least one coding sequence encoding a peptide or protein comprising an antagonistic antibody directed against CTLA4 or a fragment or variant thereof, and
optionally the same or a different coding RNA comprises at least one coding sequence encoding a peptide or protein comprising a decoy PD-1 receptor or a fragment or variant thereof.

27. The isRNA for use according to any of claims 20 to 26, wherein the subject does not receive or has not received a treatment with a PD-1 or PD-L1 antagonist and wherein the use comprises administration of at least one peptide or protein comprising a decoy PD-1 receptor or a fragment or variant thereof, or administration of a nucleic acid comprising a nucleic acid sequence encoding at least one peptide or protein comprising a decoy PD-1 receptor or a fragment or variant thereof.

28. The isRNA for use according to claim 26 or 27, wherein the coding sequence encoding a peptide or protein comprising IL-12 or a fragment or variant thereof, the coding sequence encoding a peptide or protein comprising CD40L or a fragment or variant thereof, the coding sequence encoding a peptide or protein comprising an antagonistic antibody directed against CTLA4 or a fragment or variant thereof, and, optionally, the coding sequence encoding a peptide or protein comprising a decoy PD-1 receptor or a fragment or variant thereof, are located on a separate coding RNA, preferably a separate mRNA.

29. The isRNA for use according to claim 26 or 27, wherein at least two of the coding sequences encoding a peptide or protein comprising IL-12 or a fragment or variant thereof, encoding a peptide or protein comprising CD40L or a fragment or variant thereof, encoding a peptide or protein comprising an antagonistic antibody directed against CTLA4 or a fragment or variant thereof, and, optionally, encoding a peptide or protein comprising a decoy PD-1 receptor or a fragment or variant thereof, are located on the same coding RNA, which is preferably a bi- or multicistronic RNA.

30. The isRNA for use according to any of claims 20 to 29, wherein the at least one coding RNA is administered intratumorally.

31. The isRNA for use according to claim 28, wherein the separate coding RNAs are formulated together and administered intratumorally.

32. The isRNA for use according to any of claims 20 to 31, wherein the isRNA is formulated together with the at least one coding RNA.

33. The isRNA for use according to claim 32, wherein the co-formulation is administered intratumorally.

34. The isRNA for use according to any of claims 20 to 33, wherein the at least one coding RNA comprises at least one coding sequence encoding a peptide or protein comprising IL-12, preferably at least one of IL-12A or IL-12B, or a fragment or variant of any of these proteins.

35. The isRNA for use according to claim 34, wherein the encoded peptide or protein comprises an amino acid sequence selected from the group consisting of SEQ ID NO: 3 to 8, or a fragment or variant of any of these sequences.

36. The isRNA for use according to claim 34 or 35, wherein the at least one coding sequence comprises a nucleic acid sequence selected from the group consisting of SEQ ID NO: 440 to 445 or a fragment or variant of any of these sequences.

37. The isRNA for use according to any of claims 34 to 36, wherein the encoded peptide or protein comprises IL-12A and IL-12B or a fragment or variant of each of these proteins.

38. The isRNA for use according to claim 37, wherein the encoded peptide or protein comprises an amino acid sequence according to SEQ ID NO: 10 or a fragment or variant thereof.

39. The isRNA for use according to any of claims 34 to 38, wherein the at least one coding sequence comprises a nucleic acid sequence according to SEQ ID NO: 447 or a fragment or variant thereof.

40. The isRNA for use according to any of claims 20 to 39, wherein the at least one coding RNA comprises at least one coding sequence encoding a peptide or protein comprising CD40L or a fragment or variant thereof, wherein the encoded peptide or protein preferably comprises an amino acid sequence according to SEQ ID NO: 11 or a fragment or variant thereof.

41. The isRNA for use according to claim 40, wherein the at least one coding sequence comprises a nucleic acid sequence according to SEQ ID NO: 448 or a fragment or variant thereof.

42. The isRNA for use according to any of claims 20 to 41, wherein the at least one coding RNA comprises at least one coding sequence encoding a peptide or protein comprising a decoy PD-1 receptor or a fragment or variant thereof, preferably the extracellular part of a PD-1 receptor or a fragment or variant thereof.

43. The isRNA for use according to claim 42, wherein the decoy PD-1 receptor is a peptide or protein comprising soluble PD-1 or a fragment or variant thereof.

44. The isRNA for use according to claim 42 or 43, wherein the encoded peptide or protein comprises an amino acid sequence according to SEQ ID NO: 2 or a fragment or variant thereof.

45. The isRNA for use according to any of claims 42 to 44, wherein the at least one coding sequence comprises a nucleic acid sequence according to SEQ ID NO: 439 or a fragment or variant thereof.

46. The isRNA for use according to any of claims 20 to 45, wherein the at least one coding RNA comprises at least one coding sequence encoding a peptide or protein comprising an antagonistic antibody directed against CTLA4 or a fragment or variant thereof.

47. The isRNA for use according to claim 46, wherein the encoded peptide or protein comprises an amino acid sequence according to SEQ ID NO: 645 and/or 677, or a fragment or variant of any of these amino acid sequences.

48. The isRNA for use according to claim 46 or 47, wherein the at least one coding sequence comprises a nucleic acid sequence according to SEQ ID NO: 646 and/or 678, or a fragment or variant of any of these nucleic acid sequences.

49. The isRNA for use according to any of claims 20 to 48, wherein the at least one coding RNA comprises at least one coding sequence encoding a peptide or protein comprising a tumor antigen, or a fragment or variant thereof.

50. The isRNA for use according to claim 49, wherein the tumor antigen is preferably selected from the group consisting of 1A01_HLA-A/m; 1A02; 5T4; ACRBP; AFP; AKAP4; alpha-actinin-_4/m; alpha-methylacyl-coenzyme_A_racemase; ANDR; ART-4; ARTC1/m; AURKB; B2MG; B3GN5; B4GN1; B7H₄; BAGE-1; BASI; BCL-2; bcr/abl; beta-catenin/m; BING-4; BIRC7; BRCA1/m; BY55; calreticulin; CAMEL; CASP-8/m; CASPA; cathepsin_B; cathepsin_L; CD1A; CD1B; CD1C; CD1D; CD1E; CD20; CD22; CD276; CD33; CD3E; CD3Z; CD44_Isoform_1; CD44_Isoform_6; CD4; CD52; CD55; CD56; CD80; CD86; CD8A; CDC27/m; CDE30; CDK4/m; CDKN2A/m; CEA; CEAM6; CH3L2; CLCA2; CML28; CML66; COA-1/m; coactosin-like_protein; collagen_XXIII; COX-2; CP1B1; CSAG2; CT45A1; CT55; CT-_9/BRD6; CTAG2_Isoform_LAGE-1A; CTAG2_Isoform_LAGE-1B; CTCFL; Cten; cyclin_B1; cyclin_D1; cyp-B; DAM-10; DEP1A; E7; EF1A2; EFTUD2/m; EGFR; EGLN3; ELF2/m; EMMPRIN; EpCam; EphA2; EphA3; ErbB3; ERBB4; ERG; ETV6; EWS; EZH2; FABP7; FCGR3A_Version_1; FCGR3A_Version_2; FGF5; FGFR2; fibronectin; FOS; FOXP3; FUT1; G250; GAGE-1; GAGE-2; GAGE-3; GAGE-4; GAGE-5; GAGE-6; GAGE7b; GAGE-8_(GAGE-2D); GASR; GnT-V; GPC3; GPNMB/m; GRM3; HAGE; hepsin; Her2/neu; HLA-A2/m; homeobox_NKX3.1; HOM-TES-85; HPG1; HS71A; HS71B; HST-2; hTERT; iCE; IF2B3; IL10; IL-13Ra2; IL2-RA; IL2-RB; IL2-RG; IL-5; IMP3; ITA5; ITB1; ITB6; kallikrein-2; kallikrein-3; kallikrein-4; KI20A; KIAA0205; KIF2C; KK-LC-1; LDLR; LGMN; LIRB2; LY6K; MAGA5; MAGA8; MAGAB; MAGE-A10; MAGE-A12; MAGE-A1; MAGE-A2; MAGE-A3; MAGE-A4; MAGE-A6; MAGE-A9; MAGE-B10; MAGE-B16; MAGE-B17; MAGE-_B1; MAGE-B2; MAGE-B3; MAGE-B4; MAGE-B5; MAGE-B6; MAGE-C1; MAGE-C2; MAGE-C3; MAGE-D1; MAGE-D2; MAGE-D4; MAGE-_E1; MAGE-E1_(MAGE1); MAGE-E2; MAGE-F1; MAGE-H₁; MAGEL2; mammaglobin_A; MART-1/melan-A; MART-2; MC1_R; M-CSF; mesothelin; MITF; MMP1_1; MMP7; MUC-1; MUM-1/m; MUM-2/m; MYCN; MYO1A; MYO1B; MYO1C; MYO1D; MYO1E; MYO1F; MYO1G; MYO1H; NA17; NA88-A; Neo-PAP; NFYC/m; NGEP; NPM; NRCAM; NSE; NUF2; NY-ESO-1; OA1; OGT; OS-9; osteocalcin; osteopontin; p53; PAGE-4; PAI-1; PAI-2; PAP; PATE; PAX3; PAX5; PD1L1; PDCD1; PDEF; PECA1; PGCB; PGFRB; Pim-1_-Kinase; Pin-1; PLAC1; PMEL; PML; POTEF; POTE; PRAME; PRDX5/m; PRM2; prostein; proteinase-3; PSA; PSB9; PSCA; PSGR; PSM; PTPRC; RAB8A; RAGE-1; RARA; RASH; RASK; RASN; RGS5; RHAMM/CD168; RHOC; RSSA; RU1; RU2; RUNX1; S-100; SAGE; SART-_1; SART-2; SART-3; SEPR; SERPINB5; SIA7F; SIA8A; SIAT9; SIRT2/m; SOX10; SP17; SPNXA; SPXN3; SSX-1; SSX-2; SSX3; SSX-4; ST1A1; STAG2; STAMP-1; STEAP-1; Survivin-2B; survivin; SYCP1; SYT-SSX-1; SYT-SSX-2; TARP; TCRg; TF2AA; TGFB1; TGFR2; TGM-4; TIE2; TKTL1; TPI/m; TRGV11; TRGV9; TRPC1; TRP-p8; TSG10; TSPY1; TVC_(TRGV3); TX101; tyrosinase; TYRP1; TYRP2; UPA; VEGFR1; WT1; and XAGE1.

51. The isRNA for use according to claim 49 or 50, wherein the at least one coding RNA is not administered intratumorally.

52. The isRNA for use according to any of claims 49 to 51, wherein the at least one coding RNA is administered intradermally, intramuscularly or subcutaneously.

53. The isRNA for use according to any of claims 20 to 52, wherein the at least one coding RNA comprises at least one coding sequence comprising a nucleic acid sequence that is modified compared to the nucleic acid sequence of the coding sequence of the corresponding wild type RNA, and wherein the amino acid sequence encoded by said coding sequence is preferably not modified compared to the amino acid sequence encoded by the coding sequence of the corresponding wild type RNA.

54. The isRNA for use according to claim 53, wherein the at least one coding sequence comprises
a) a nucleic acid sequence selected from the group consisting of SEQ ID NOs: 25-30; 36-41; 47-52; 58-63; 69-74; 80-85; 91-96; 102-107; 113-118; 124-129; 135-140; 601-606; 612-617; 623-628; 716-725; 727; 1018-1021 and 1059-1062, or a fragment or variant of any of these sequences, preferably from the group consisting of 32; 43; 54; 65; 76; 87; 98; 109; 120; 131; 142; 608; 619; 630; 632-644; 726 and 1058, or a fragment or variant of any of these sequences;
b) a nucleic acid sequence selected from the group consisting of SEQ ID NOs: 33; 44; 55; 66; 77; 88; 99; 110; 121; 132; 143; 609; 620; 631; 728-738 and 1025-1028, or a fragment or variant of any of these sequences,
c) a nucleic acid sequence selected from the group consisting of SEQ ID NO: 646-660; 662-676; 678-692; 694-705; 707-715 or 1029-1041, or a fragment or variant of any of these sequences, and/or
d) optionally, a nucleic acid sequence selected from the group consisting of SEQ ID NOs: 23; 34; 45; 56; 67; 78; 89; 100; 111; 122; 133; 599; 610; 621; 1022-1024, or a fragment or variant of any of these sequences, preferably from the group consisting of SEQ ID NOs: 24; 35; 46; 57; 68; 79; 90; 101; 112; 123; 134; 600; 611; 622 and 1043-1054, or a fragment or variant of any of these sequences

55. The isRNA for use according to any of claims 20 to 54, wherein the at least one coding RNA comprises at least one coding sequence having a modified, preferably an increased, G/C content compared to the G/C content of the coding sequence of the corresponding wild type RNA, and wherein the amino acid sequence encoded by said coding sequence is preferably not modified compared to the amino acid sequence encoded by the coding sequence of the corresponding wild type RNA.

56. The isRNA for use according to claim 55, wherein the at least one coding sequence comprises
a) a nucleic acid sequence selected from the group consisting of SEQ ID NOs: 25-30; 80-85; 91-96; 102-107; 113-118; 601-606; 124-129; 135-140; 612-617; 623-628; 716-725 and 72, or a fragment or variant of any of these sequences, preferably from the group consisting of SEQ ID NOs: 32; 87; 98; 109; 120; 131; 142; 608; 619; 630; 632; 636-644 and 726, or a fragment or variant of any of these sequences;
b) a nucleic acid sequence selected from the group consisting of SEQ ID NOs: 33; 88; 99; 110; 121; 132; 143; 609; 620; 631 and 728-738, or a fragment or variant of any of these sequences, and/or
c) a nucleic acid sequence selected from the group consisting of SEQ ID NOs: 646; 650-658; 662; 666-674; SEQ ID NO: 678; 682-690; 694; 698-705; 707; 710 and 713, or a fragment or variant of any of these sequences, and/or
d) optionally, a nucleic acid sequence selected from the group consisting of SEQ ID NOs: 23; 78; 89; 100; 111; 122; 133; 599; 610 and 621, or a fragment or variant of any of these sequences, preferably from the group consisting of SEQ ID NOs: 24; 79; 90; 101; 112; 123; 134; 600; 611 and 622, or a fragment or variant of any of these sequences.

57. The isRNA for use according to any of claims 20 to 58, wherein the at least one coding RNA comprises a 5′-CAP structure.

58. The isRNA for use according to any of claims 20 to 57, wherein the at least one coding RNA comprises a 5′-UTR element and/or a 3′-UTR element.

59. The isRNA for use according to any of claims 20 to 58, wherein the at least one coding RNA comprises a poly(A) and/or a poly(C) sequence.

60. The isRNA for use according to any of claims 20 to 59, wherein the at least one coding RNA comprises a histone stem-loop sequence.

61. The isRNA for use according to any of claims 20 to 60, wherein the at least one coding RNA comprises
a) a nucleic acid sequence selected from the group consisting of SEQ ID NOs: 146-151; 451-456; 157-162; 168-173; 179-184; 190-195; 201-206; 212-217; 223-228; 234-239; 245-250; 256-261 and 267-272, or a fragment or variant of any of these sequences, preferably from the group consisting of SEQ ID NOs: 153; 458; 164; 175; 186; 197; 208; 219; 230; 241; 252; 263, 274; 992 and 598, or a fragment or variant of any of these sequences,
b) a nucleic acid sequence selected from the group consisting of SEQ ID NOs: 154; 459; 165; 176; 187; 198; 209; 220; 231; 242; 253; 264, 275 and 596, or a fragment or variant of any of these sequences,
c) a nucleic acid sequence selected from the group consisting of SEQ ID NOs: 594; 595; 860-925, or a fragment or variant of any of these sequences, and/or
d) optionally, a nucleic acid sequence selected from the group consisting of SEQ ID NOs: 144; 449; 155; 166; 177; 188; 199; 210; 221; 232; 243; 254 and 265, or a fragment or variant of any of these sequences, preferably from the group consisting of SEQ ID NOs: 145; 450; 156; 167; 178; 189; 200; 211; 222; 233; 244; 255; 266 and 597, or a fragment or variant of any of these sequences.

62. The isRNA for use according to claim any of claims 20 to 61, wherein the treatment comprises administration, preferably intratumoral administration, of at least three coding RNAs, wherein
a first coding RNA comprises a nucleic acid sequence selected from the group consisting of SEQ ID NOs: 153; 164; 175; 186; 197; 208; 219; 230; 241; 252; 263; 274; 992; 458 and 598, or a fragment or variant of any of these sequences,
a second coding RNA comprises a nucleic acid sequence selected from the group consisting of SEQ ID NOs: 154; 165; 176; 187; 198; 209; 220; 231; 242; 253; 264; 275; 459 and 596, or a fragment or variant of any of these sequences, and
a third coding RNA comprises a nucleic acid sequence selected from the group consisting of SEQ ID NOs: −920-922 or 923-925, or a fragment or variant of any of these sequences, and
optionally, a fourth coding RNA comprises a nucleic acid sequence selected from the group consisting of SEQ ID NOs: 145; 156; 167; 178; 189; 200; 211; 222; 233; 244; 255; 266; 450 and 597, or a fragment or variant of any of these sequences.

63. The isRNA for use according to claim any of claims 20 to 62, wherein the treatment comprises administration, preferably intratumoral administration, of at least four coding RNAs, wherein
a first coding RNA comprises a nucleic acid sequence selected from the group consisting of SEQ ID NOs: 153; 164; 175; 186; 197; 208; 219; 230; 241; 252; 263; 274; 992; 458 and 598, or a fragment or variant of any of these sequences,
a second coding RNA comprises a nucleic acid sequence selected from the group consisting of SEQ ID NOs: 154; 165; 176; 187; 198; 209; 220; 231; 242; 253; 264; 275; 459 and 596, or a fragment or variant of any of these sequences,
a third coding RNA comprises a nucleic acid sequence selected from the group consisting of SEQ ID NOs: 594 and 860-874, or a fragment or variant of any of these sequences,
a fourth coding RNA comprises a nucleic acid sequence selected from the group consisting of SEQ ID NOs: 595 and 890-904, or a fragment or variant of any of these sequences, and
optionally, a fifth coding RNA comprises a nucleic acid sequence selected from the group consisting of SEQ ID NOs: 145; 156; 167; 178; 189; 200; 211; 222; 233; 244; 255; 266; 450 and 597, or a fragment or variant of any of these sequences.

64. The isRNA for use according to any of claims 20 to 63, wherein the at least one coding RNA comprises
a) a nucleic acid sequence selected from the group consisting of SEQ ID NOs: 278-283; 289-294; 300-305; 311-316; 322-327; 333-338; 344-349; 355-360; 366-371; 377-382; 388-393; 399-404 and 462-467, or a fragment or variant of any of these sequences, preferably from the group consisting of SEQ ID NOs: 285; 296; 307; 318; 329; 340; 351; 362; 373; 384; 395; 406; 430; 469 and 992, or a fragment or variant of any of these sequences,
b) a nucleic acid sequence selected from the group consisting of SEQ ID NO: 286; 297; 308; 319; 330; 341; 352; 363; 374; 385; 396; 470 and 407, or a fragment or variant of any of these sequences,
c) a nucleic acid sequence selected from the group consisting of SEQ ID NOs: 926-955, or a fragment or variant of any of these nucleic acid sequences, and a nucleic acid sequence selected from the group consisting of SEQ ID NOs: 956-985, or a fragment or variant of any of these nucleic acid sequences; or a nucleic acid sequence selected from the group consisting of SEQ ID NOs: 986-991, or a fragment or variant of any of these nucleic acid sequences, and/or
d) optionally, a nucleic acid sequence selected from the group consisting of SEQ ID NOs: 276; 287; 298; 309; 320; 331; 342; 353; 364; 375; 386; 460 and 397, or a fragment or variant of any of these sequences, preferably from the group consisting of SEQ ID NOs: 277; 288; 299; 310; 321; 332; 343; 354; 365; 376; 461; 387 and 398, or a fragment or variant of any of these sequences.

65. The isRNA for use according to claim any of claims 20 to 64, wherein the treatment comprises administration, preferably intratumoral administration, of at least four coding RNAs, wherein
a first coding RNA comprises a nucleic acid sequence selected from the group consisting of SEQ ID NOs: 285; 296; 307; 318; 329; 340; 351; 362; 373; 384; 395; 406; 430; 469 and 992, or a fragment or variant of any of these sequences,
a second coding RNA comprises a nucleic acid sequence selected from the group consisting of SEQ ID NOs: 286; 297; 308; 319; 330; 341; 352; 363; 374; 385; 396; 470 and 407, or a fragment or variant of any of these sequences,
a third coding RNA comprises a nucleic acid sequence selected from the group consisting of SEQ ID NOs: 926-940, or a fragment or variant of any of these sequences,
a fourth coding RNA comprises a nucleic acid sequence selected from the group consisting of SEQ ID NOs: 956-970, or a fragment or variant of any of these sequences, and
optionally, a fifth coding RNA comprises a nucleic acid sequence selected from the group consisting of SEQ ID NOs: 277; 288; 299; 310; 321; 332; 343; 354; 365; 376; 387; 461 and 398, or a fragment or variant of any of these sequences.

66. The isRNA for use according to any of claims 20 to 65, wherein the isRNA is administered as RNA complexed with one or more cationic or polycationic compounds, and the at least one coding RNA, preferably an mRNA, is administered as free RNA or is administered a RNA that is complexed with one or more lipids, thereby forming liposomes, lipid nanoparticles and/or lipoplexes.

67. The isRNA for use according to any of claims 1 to 66, wherein the treatment comprises chemotherapy, radiation therapy and/or surgery.

68. Pharmaceutical composition comprising an immunostimulatory RNA (isRNA) and a pharmaceutically acceptable carrier and/or vehicle for use in the treatment of a tumor or cancer disease preferably selected from the group consisting of cutaneous melanoma (cMEL), cutaneous squamous cell carcinoma (cSCC), head and neck squamous cell carcinoma (HNSCC), adenoid cystic carcinoma (ACC), cutaneous T-cell lymphoma, preferably cutaneous T-cell lymphoma of mycosis fungoides subtype, and vulvar squamous cell cancer (VSCC), wherein the tumor or the cancer disease is preferably at an advanced stage and/or refractory to standard therapy.

69. The pharmaceutical composition for use according to claim 68, wherein the isRNA is as defined in claims 1 to 12.

70. The pharmaceutical composition for use according to claim 68 or 69, wherein the treatment comprises administration of at least one additional pharmaceutically active ingredient, preferably as defined in any of claims 13 to 62.

71. Kit or kit of parts comprising an immunostimulatory RNA (isRNA), preferably the isRNA as defined in claims 1 to 12, or the pharmaceutical composition as defined in any of claims 68 to 70, and optionally technical instructions with information on the administration and dosage for administration,
for use in the treatment of a tumor or cancer disease preferably selected from the group consisting of cutaneous melanoma (cMEL), cutaneous squamous cell carcinoma (cSCC), head and neck squamous cell carcinoma (HNSCC), adenoid cystic carcinoma (ACC), cutaneous T-cell lymphoma, preferably cutaneous T-cell lymphoma of mycosis fungoides subtype, and vulvar squamous cell cancer (VSCC), wherein the tumor or the cancer disease is preferably at an advanced stage and/or refractory to standard therapy,
wherein the pharmaceutical composition is administered intratumorally.

72. Use of an isRNA, preferably the isRNA as defined according to any of claims 1 to 12, the pharmaceutical composition as defined in any of claims 68 to 70, or the kit or kit of parts as defined in claim 71, for use in the manufacture of a medicament for treatment of a tumor or cancer disease preferably selected from the group consisting of cutaneous melanoma (cMEL), cutaneous squamous cell carcinoma (cSCC), head and neck squamous cell carcinoma (HNSCC), adenoid cystic carcinoma (ACC), cutaneous T-cell lymphoma, preferably cutaneous T-cell lymphoma of mycosis fungoides subtype, and vulvar squamous cell cancer (VSCC), wherein the tumor or the cancer disease is preferably at an advanced stage and/or refractory to standard therapy, for intratumoral administration.

73. Method of treating or preventing a disorder selected from the group consisting of a tumor or cancer disease preferably selected from the group consisting of cutaneous melanoma (cMEL), cutaneous squamous cell carcinoma (cSCC), head and neck squamous cell carcinoma (HNSCC), adenoid cystic carcinoma (ACC), cutaneous T-cell lymphoma, preferably cutaneous T-cell lymphoma of mycosis fungoides subtype, and vulvar squamous cell cancer (VSCC), wherein the tumor or the cancer disease is preferably at an advanced stage and/or refractory to standard therapy, wherein the method comprises administering, preferably intratumorally, to a subject in need thereof an effective amount of an isRNA, preferably the isRNA as defined according to any of claims 1 to 12, the pharmaceutical composition as defined in any of claims 68 to 70, or the kit or kit of parts as defined in claim 71.

The application's sequence listing, which the Patent Office published only in electronic form, follows.

SEQUENCE LISTING (1062 sequences)

SEQ ID NO: 1 - protein, 288 aa, Artificial Sequence
  PDCD1
MQIPQAPWPVVWAVLQLGWRPGWFLDSPDRPWNPPTFSPALLVVTEGDNATFTCSFSNTSESFVLNWYRMSPSNQTDKLAAFPEDRSQPGQDCRFRVTQLPNGRDFHMSVVRARRNDSGTYLCGAISLAPKAQIKESLRAELRVTERRAEVPTAHPSPSPRPAGQFQTLVVGVVGGLLGSLVLLVWVLAVICSRAARGTIGARRTGQPLKEDPSAVPVFSVDYGELDFQWREKTPEPPVPCVPEQTEYATIVFPSGMGTSSPARRGSADGPRSAQPLRPEDGHCSWPL

SEQ ID NO: 2 - protein, 149 aa, Artificial Sequence
  PDCD1(1-149)
MQIPQAPWPVVWAVLQLGWRPGWFLDSPDRPWNPPTFSPALLVVTEGDNATFTCSFSNTSESFVLNWYRMSPSNQTDKLAAFPEDRSQPGQDCRFRVTQLPNGRDFHMSVVRARRNDSGTYLCGAISLAPKAQIKESLRAELRVTERRA

SEQ ID NO: 3 - protein, 219 aa, Artificial Sequence
  IL12A
MCPARSLLLVATLVLLDHLSLARNLPVATPDPGMFPCLHHSQNLLRAVSNMLQKARQTLEFYPCTSEEIDHEDITKDKTSTVEACLPLELTKNESCLNSRETSFITNGSCLASRKTSFMMALCLSSIYEDLKMYQVEFKTMNAKLLMDPKRQIFLDQNMLAVIDELMQALNFNSETVPQKSSLEEPDFYKTKIKLCILLHAFRIRAVTIDRVMSYLNAS

SEQ ID NO: 4 - protein, 219 aa, Artificial Sequence; identical to SEQ ID NO: 3
  IL12A(1-219)

SEQ ID NO: 5 - protein, 197 aa, Artificial Sequence
  IL12A(23-219)
RNLPVATPDPGMFPCLHHSQNLLRAVSNMLQKARQTLEFYPCTSEEIDHEDITKDKTSTVEACLPLELTKNESCLNSRETSFITNGSCLASRKTSFMMALCLSSIYEDLKMYQVEFKTMNAKLLMDPKRQIFLDQNMLAVIDELMQALNFNSETVPQKSSLEEPDFYKTKIKLCILLHAFRIRAVTIDRVMSYLNAS

SEQ ID NO: 6 - protein, 328 aa, Artificial Sequence
  IL12B
MCHQQLVISWFSLVFLASPLVAIWELKKDVYVVELDWYPDAPGEMVVLTCDTPEEDGITWTLDQSSEVLGSGKTLTIQVKEFGDAGQYTCHKGGEVLSHSLLLLHKKEDGIWSTDILKDQKEPKNKTFLRCEAKNYSGRFTCWWLTTISTDLTFSVKSSRGSSDPQGVTCGAATLSAERVRGDNKEYEYSVECQEDSACPAAEESLPIEVMVDAVHKLKYENYTSSFFIRDIIKPDPPKNLQLKPLKNSRQVEVSWEYPDTWSTPHSYFSLTFCVQVQGKSKREKKDRVFTDKTSATVICRKNASISVRAQDRYYSSSWSEWASVPCS

SEQ ID NO: 7 - protein, 328 aa, Artificial Sequence; identical to SEQ ID NO: 6
  IL12B(1-328)

SEQ ID NO: 8 - protein, 306 aa, Artificial Sequence
  IL12B(23-328)
IWELKKDVYVVELDWYPDAPGEMVVLTCDTPEEDGITWTLDQSSEVLGSGKTLTIQVKEFGDAGQYTCHKGGEVLSHSLLLLHKKEDGIWSTDILKDQKEPKNKTFLRCEAKNYSGRFTCWWLTTISTDLTFSVKSSRGSSDPQGVTCGAATLSAERVRGDNKEYEYSVECQEDSACPAAEESLPIEVMVDAVHKLKYENYTSSFFIRDIIKPDPPKNLQLKPLKNSRQVEVSWEYPDTWSTPHSYFSLTFCVQVQGKSKREKKDRVFTDKTSATVICRKNASISVRAQDRYYSSSWSEWASVPCS

SEQ ID NO: 9 - protein, 18 aa, Artificial Sequence
  Linker-sFvCC49-218
GSTSGSGKPGSGEGSTKG

SEQ ID NO: 10 - protein, 543 aa, Artificial Sequence
  IL12
MCHQQLVISWFSLVFLASPLVAIWELKKDVYVVELDWYPDAPGEMVVLTCDTPEEDGITWTLDQSSEVLGSGKTLTIQVKEFGDAGQYTCHKGGEVLSHSLLLLHKKEDGIWSTDILKDQKEPKNKTFLRCEAKNYSGRFTCWWLTTISTDLTFSVKSSRGSSDPQGVTCGAATLSAERVRGDNKEYEYSVECQEDSACPAAEESLPIEVMVDAVHKLKYENYTSSFFIRDIIKPDPPKNLQLKPLKNSRQVEVSWEYPDTWSTPHSYFSLTFCVQVQGKSKREKKDRVFTDKTSATVICRKNASISVRAQDRYYSSSWSEWASVPCSGSTSGSGKPGSGEGSTKGRNLPVATPDPGMFPCLHHSQNLLRAVSNMLQKARQTLEFYPCTSEEIDHEDITKDKTSTVEACLPLELTKNESCLNSRETSFITNGSCLASRKTSFMMALCLSSIYEDLKMYQVEFKTMNAKLLMDPKRQIFLDQNMLAVIDELMQALNFNSETVPQKSSLEEPDFYKTKIKLCILLHAFRIRAVTIDRVMSYLNAS

SEQ ID NO: 11 - protein, 261 aa, Artificial Sequence
  CD40LG
MIETYNQTSPRSAATGLPISMKIFMYLLTVFLITQMIGSALFAVYLHRRLDKIEDERNLHEDFVFMKTIQRCNTGERSLSLLNCEEIKSQFEGFVKDIMLNKEETKKENSFEMQKGDQNPQIAAHVISEASSKTTSVLQWAEKGYYTMSNNLVTLENGKQLTVKRQGLYYIYAQVTFCSNREASSQAPFIASLCLKSPGRFERILLRAANTHSSAKPCGQQSIHLGGVFELQPGASVFVNVTDPSQVSHGTGFTSFGLLKL

SEQ ID NO: 12 - RNA, 867 nt, Artificial Sequence
  PDCD1 CDS mRNA wild type
augcagaucccacaggcgcccuggccagucgucugggcggugcuacaacugggcuggcggccaggaugguucuuagacuccccagacaggcccuggaacccccccaccuucuccccagcccugcucguggugaccgaaggggacaacgccaccuucaccugcagcuucuccaacacaucggagagcuucgugcuaaacugguaccgcaugagccccagcaaccagacggacaagcuggccgcuuuccccgaggaccgcagccagcccggccaggacugccgcuuccgugucacacaacugcccaacgggcgugacuuccacaugagcguggucagggcccggcgcaaugacagcggcaccuaccucuguggggccaucucccuggcccccaaggcgcagaucaaagagagccugcgggcagagcucagggugacagagagaagggcagaagugcccacagcccaccccagccccucacccaggccagccggccaguuccaaacccuggugguuggugucgugggcggccugcugggcagccuggugcugcuagucuggguccuggccgucaucugcucccgggccgcacgagggacaauaggagccaggcgcaccggccagccccugaaggaggaccccucagccgugccuguguucucuguggacuauggggagcuggauuuccaguggcgagagaagaccccggagccccccgugcccugugucccugagcagacggaguaugccaccauugucuuuccuagcggaaugggcaccucaucccccgcccgcaggggcucagccgacggcccucggagugcccagccacugaggccugaggauggacacugcucuuggccccucuga

SEQ ID NO: 13 - RNA, 450 nt, Artificial Sequence
  PDCD1(1-149) CDS mRNA wild type
augcagaucccacaggcgcccuggccagucgucugggcggugcuacaacugggcuggcggccaggaugguucuuagacuccccagacaggcccuggaacccccccaccuucuccccagcccugcucguggugaccgaaggggacaacgccaccuucaccugcagcuucuccaacacaucggagagcuucgugcuaaacugguaccgcaugagccccagcaaccagacggacaagcuggccgcuuuccccgaggaccgcagccagcccggccaggacugccgcuuccgugucacacaacugcccaacgggcgugacuuccacaugagcguggucagggcccggcgcaaugacagcggcaccuaccucuguggggccaucucccuggcccccaaggcgcagaucaaagagagccugcgggcagagcucagggugacagagagaagggcauga

SEQ ID NO: 14 - RNA, 660 nt, Artificial Sequence
  IL12A CDS mRNA wild type
auguguccagcgcgcagccuccuccuuguggcuacccugguccuccuggaccaccucaguuuggccagaaaccuccccguggccacuccagacccaggaauguucccaugccuucaccacucccaaaaccugcugagggccgucagcaacaugcuccagaaggccagacaaacucuagaauuuuacccuugcacuucugaagagauugaucaugaagauaucacaaaagauaaaaccagcacaguggaggccuguuuaccauuggaauuaaccaagaaugagaguugccuaaauuccagagagaccucuuucauaacuaaugggaguugccuggccuccagaaagaccucuuuuaugauggcccugugccuuaguaguauuuaugaagacuugaagauguaccagguggaguucaagaccaugaaugcaaagcuucugauggauccuaagaggcagaucuuucuagaucaaaacaugcuggcaguuauugaugagcugaugcaggcccugaauuucaacagugagacugugccacaaaaauccucccuugaagaaccggauuuuuauaaaacuaaaaucaagcucugcauacuucuucaugcuuucagaauucgggcagugacuauugauagagugaugagcuaucugaaugcuuccuaa

SEQ ID NO: 15 - RNA, 657 nt, Artificial Sequence
  IL12A(1-219) CDS mRNA wild type
auguguccagcgcgcagccuccuccuuguggcuacccugguccuccuggaccaccucaguuuggccagaaaccuccccguggccacuccagacccaggaauguucccaugccuucaccacucccaaaaccugcugagggccgucagcaacaugcuccagaaggccagacaaacucuagaauuuuacccuugcacuucugaagagauugaucaugaagauaucacaaaagauaaaaccagcacaguggaggccuguuuaccauuggaauuaaccaagaaugagaguugccuaaauuccagagagaccucuuucauaacuaaugggaguugccuggccuccagaaagaccucuuuuaugauggcccugugccuuaguaguauuuaugaagacuugaagauguaccagguggaguucaagaccaugaaugcaaagcuucugauggauccuaagaggcagaucuuucuagaucaaaacaugcuggcaguuauugaugagcugaugcaggcccugaauuucaacagugagacugugccacaaaaauccucccuugaagaaccggauuuuuauaaaacuaaaaucaagcucugcauacuucuucaugcuuucagaauucgggcagugacuauugauagagugaugagcuaucugaaugcuucc

SEQ ID NO: 16 - RNA, 594 nt, Artificial Sequence
  IL12A(23-219) CDS mRNA wild type
agaaaccuccccguggccacuccagacccaggaauguucccaugccuucaccacucccaaaaccugcugagggccgucagcaacaugcuccagaaggccagacaaacucuagaauuuuacccuugcacuucugaagagauugaucaugaagauaucacaaaagauaaaaccagcacaguggaggccuguuuaccauuggaauuaaccaagaaugagaguugccuaaauuccagagagaccucuuucauaacuaaugggaguugccuggccuccagaaagaccucuuuuaugauggcccugugccuuaguaguauuuaugaagacuugaagauguaccagguggaguucaagaccaugaaugcaaagcuucugauggauccuaagaggcagaucuuucuagaucaaaacaugcuggcaguuauugaugagcugaugcaggcccugaauuucaacagugagacugugccacaaaaauccucccuugaagaaccggauuuuuauaaaacuaaaaucaagcucugcauacuucuucaugcuuucagaauucgggcagugacuauugauagagugaugagcuaucugaaugcuuccuaa

SEQ ID NO: 17 - RNA, 987 nt, Artificial Sequence
  IL12B CDS mRNA wild type
augugucaccagcaguuggucaucucuugguuuucccugguuuuucuggcaucuccccucguggccauaugggaacugaagaaagauguuuaugucguagaauuggauugguauccggaugccccuggagaaauggugguccucaccugugacaccccugaagaagaugguaucaccuggaccuuggaccagagcagugaggucuuaggcucuggcaaaacccugaccauccaagucaaagaguuuggagaugcuggccaguacaccugucacaaaggaggcgagguucuaagccauucgcuccugcugcuucacaaaaaggaagauggaauuugguccacugauauuuuaaaggaccagaaagaacccaaaaauaagaccuuucuaagaugcgaggccaagaauuauucuggacguuucaccugcugguggcugacgacaaucaguacugauuugacauucagugucaaaagcagcagaggcucuucugacccccaaggggugacgugcggagcugcuacacucucugcagagagagucagaggggacaacaaggaguaugaguacucaguggagugccaggaggacagugccugcccagcugcugaggagagucugcccauugaggucaugguggaugccguucacaagcucaaguaugaaaacuacaccagcagcuucuucaucagggacaucaucaaaccugacccacccaagaacuugcagcugaagccauuaaagaauucucggcagguggaggucagcugggaguacccugacaccuggaguacuccacauuccuacuucucccugacauucugcguucagguccagggcaagagcaagagagaaaagaaagauagagucuucacggacaagaccucagccacggucaucugccgcaaaaaugccagcauuagcgugcgggcccaggaccgcuacuauagcucaucuuggagcgaaugggcaucugugcccugcaguuag

SEQ ID NO: 18 - RNA, 984 nt, Artificial Sequence
  IL12B(1-328) CDS mRNA wild type
augugucaccagcaguuggucaucucuugguuuucccugguuuuucuggcaucuccccucguggccauaugggaacugaagaaagauguuuaugucguagaauuggauugguauccggaugccccuggagaaauggugguccucaccugugacaccccugaagaagaugguaucaccuggaccuuggaccagagcagugaggucuuaggcucuggcaaaacccugaccauccaagucaaagaguuuggagaugcuggccaguacaccugucacaaaggaggcgagguucuaagccauucgcuccugcugcuucacaaaaaggaagauggaauuugguccacugauauuuuaaaggaccagaaagaacccaaaaauaagaccuuucuaagaugcgaggccaagaauuauucuggacguuucaccugcugguggcugacgacaaucaguacugauuugacauucagugucaaaagcagcagaggcucuucugacccccaaggggugacgugcggagcugcuacacucucugcagagagagucagaggggacaacaaggaguaugaguacucaguggagugccaggaggacagugccugcccagcugcugaggagagucugcccauugaggucaugguggaugccguucacaagcucaaguaugaaaacuacaccagcagcuucuucaucagggacaucaucaaaccugacccacccaagaacuugcagcugaagccauuaaagaauucucggcagguggaggucagcugggaguacccugacaccuggaguacuccacauuccuacuucucccugacauucugcguucagguccagggcaagagcaagagagaaaagaaagauagagucuucacggacaagaccucagccacggucaucugccgcaaaaaugccagcauuagcgugcgggcccaggaccgcuacuauagcucaucuuggagcgaaugggcaucugugcccugcagu

SEQ ID NO: 19 - RNA, 921 nt, Artificial Sequence
  IL12B(23-328) CDS mRNA wild type
auaugggaacugaagaaagauguuuaugucguagaauuggauugguauccggaugccccuggagaaauggugguccucaccugugacaccccugaagaagaugguaucaccuggaccuuggaccagagcagugaggucuuaggcucuggcaaaacccugaccauccaagucaaagaguuuggagaugcuggccaguacaccugucacaaaggaggcgagguucuaagccauucgcuccugcugcuucacaaaaaggaagauggaauuugguccacugauauuuuaaaggaccagaaagaacccaaaaauaagaccuuucuaagaugcgaggccaagaauuauucuggacguuucaccugcugguggcugacgacaaucaguacugauuugacauucagugucaaaagcagcagaggcucuucugacccccaaggggugacgugcggagcugcuacacucucugcagagagagucagaggggacaacaaggaguaugaguacucaguggagugccaggaggacagugccugcccagcugcugaggagagucugcccauugaggucaugguggaugccguucacaagcucaaguaugaaaacuacaccagcagcuucuucaucagggacaucaucaaaccugacccacccaagaacuugcagcugaagccauuaaagaauucucggcagguggaggucagcugggaguacccugacaccuggaguacuccacauuccuacuucucccugacauucugcguucagguccagggcaagagcaagagagaaaagaaagauagagucuucacggacaagaccucagccacggucaucugccgcaaaaaugccagcauuagcgugcgggcccaggaccgcuacuauagcucaucuuggagcgaaugggcaucugugcccugcaguuag

SEQ ID NO: 20 - RNA, 54 nt, Artificial Sequence
  Linker-sFvCC49-218 CDS mRNA wild type
ggcaguacuucgggcagugguaagccugguaguggugaggguaguacuaagggu

SEQ ID NO: 21 - RNA, 1632 nt, Artificial Sequence
  IL12 CDS mRNA wild type
augugucaccagcaguuggucaucucuugguuuucccugguuuuucuggcaucuccccucguggccauaugggaacugaagaaagauguuuaugucguagaauuggauugguauccggaugccccuggagaaauggugguccucaccugugacaccccugaagaagaugguaucaccuggaccuuggaccagagcagugaggucuuaggcucuggcaaaacccugaccauccaagucaaagaguuuggagaugcuggccaguacaccugucacaaaggaggcgagguucuaagccauucgcuccugcugcuucacaaaaaggaagauggaauuugguccacugauauuuuaaaggaccagaaagaacccaaaaauaagaccuuucuaagaugcgaggccaagaauuauucuggacguuucaccugcugguggcugacgacaaucaguacugauuugacauucagugucaaaagcagcagaggcucuucugacccccaaggggugacgugcggagcugcuacacucucugcagagagagucagaggggacaacaaggaguaugaguacucaguggagugccaggaggacagugccugcccagcugcugaggagagucugcccauugaggucaugguggaugccguucacaagcucaaguaugaaaacuacaccagcagcuucuucaucagggacaucaucaaaccugacccacccaagaacuugcagcugaagccauuaaagaauucucggcagguggaggucagcugggaguacccugacaccuggaguacuccacauuccuacuucucccugacauucugcguucagguccagggcaagagcaagagagaaaagaaagauagagucuucacggacaagaccucagccacggucaucugccgcaaaaaugccagcauuagcgugcgggcccaggaccgcuacuauagcucaucuuggagcgaaugggcaucugugcccugcaguggcaguacuucgggcagugguaagccugguaguggugaggguaguacuaaggguagaaaccuccccguggccacuccagacccaggaauguucccaugccuucaccacucccaaaaccugcugagggccgucagcaacaugcuccagaaggccagacaaacucuagaauuuuacccuugcacuucugaagagauugaucaugaagauaucacaaaagauaaaaccagcacaguggaggccuguuuaccauuggaauuaaccaagaaugagaguugccuaaauuccagagagaccucuuucauaacuaaugggaguugccuggccuccagaaagaccucuuuuaugauggcccugugccuuaguaguauuuaugaagacuugaagauguaccagguggaguucaagaccaugaaugcaaagcuucugauggauccuaagaggcagaucuuucuagaucaaaacaugcuggcaguuauugaugagcugaugcaggcccugaauuucaacagugagacugugccacaaaaauccucccuugaagaaccggauuuuuauaaaacuaaaaucaagcucugcauacuucuucaugcuuucagaauucgggcagugacuauugauagagugaugagcuaucugaaugcuuccuaa

SEQ ID NO: 22 - RNA, 786 nt, Artificial Sequence
  CD40LG CDS mRNA wild type
augaucgaaacauacaaccaaacuucuccccgaucugcggccacuggacugcccaucagcaugaaaauuuuuauguauuuacuuacuguuuuucuuaucacccagaugauugggucagcacuuuuugcuguguaucuucauagaagguuggacaagauagaagaugaaaggaaucuucaugaagauuuuguauucaugaaaacgauacagagaugcaacacaggagaaagauccuuauccuuacugaacugugaggagauuaaaagccaguuugaaggcuuugugaaggauauaauguuaaacaaagaggagacgaagaaagaaaacagcuuugaaaugcaaaaaggugaucagaauccucaaauugcggcacaugucauaagugaggccagcaguaaaacaacaucuguguuacagugggcugaaaaaggauacuacaccaugagcaacaacuugguaacccuggaaaaugggaaacagcugaccguuaaaagacaaggacucuauuauaucuaugcccaagucaccuucuguuccaaucgggaagcuucgagucaagcuccauuuauagccagccucugccuaaagucccccgguagauucgagagaaucuuacucagagcugcaaauacccacaguuccgccaaaccuugcgggcaacaauccauucacuugggaggaguauuugaauugcaaccaggugcuucgguguuugucaaugugacugauccaagccaagugagccauggcacuggcuucacguccuuuggcuuacucaaacucuga

SEQ ID NO: 23 - RNA, 867 nt, Artificial Sequence
  PDCD1 CDS mRNA opt1
augcagaucccccaggccccguggcccguggucugggccgugcugcagcucggcuggcgccccgggugguuccuggacagccccgaccggccguggaacccgcccaccuucucccccgcgcugcucguggucaccgagggcgacaacgccacguucacgugcagcuucuccaacaccagcgaguccuucgugcugaacugguaccgcaugagccccuccaaccagaccgacaagcuggccgccuuccccgaggaccggagccagcccgggcaggacugccgcuuccgggugacccagcuccccaacggccgcgacuuccacauguccgucgugcgggcccgccggaacgacagcgggaccuaccugugcggcgcgaucucccuggccccgaaggcccagaucaaggagagccuccgcgccgagcugcgggugaccgagcgccgggcggagguccccaccgcccaccccucccccagcccgcgccccgccggccaguuccagacgcugguggugggggucgugggcgggcuccugggcucccuggugcuccuggucugggugcuggccgugaucugcagccgggccgcgcgcgggaccaucggcgcccggcgcaccggccagccccucaaggaggaccccuccgccgucccgguguucagcguggacuacggggagcuggacuuccaguggcgggagaagacccccgagccgcccguccccugcgugcccgagcagacggaguacgccaccaucguguuccccuccggcauggggaccagcagccccgcccgccggggcuccgcggacggcccgcgcagcgcccagccccugcgccccgaggacgggcacugcuccuggccgcucuga

SEQ ID NO: 24 - RNA, 450 nt, Artificial Sequence
  PDCD1(1-149) CDS mRNA opt1
augcagaucccccaggccccguggcccguggucugggccgugcugcagcucggcuggcgccccgggugguuccuggacagccccgaccggccguggaacccgcccaccuucucccccgcgcugcucguggucaccgagggcgacaacgccacguucacgugcagcuucuccaacaccagcgaguccuucgugcugaacugguaccgcaugagccccuccaaccagaccgacaagcuggccgccuuccccgaggaccggagccagcccgggcaggacugccgcuuccgggugacccagcuccccaacggccgcgacuuccacauguccgucgugcgggcccgccggaacgacagcgggaccuaccugugcggcgcgaucucccuggccccgaaggcccagaucaaggagagccuccgcgccgagcugcgggugaccgagcgccgggcguga

SEQ ID NO: 25 - RNA, 660 nt, Artificial Sequence
  IL12A CDS mRNA opt1
augugccccgcccgcagccugcuccugguggccacccugguccuccuggaccaccugucccucgcgcggaaccugccgguggccacccccgaccccggcauguuccccugccugcaccacagccagaaccuccugcgcgccguguccaacaugcugcagaaggcccggcagacgcucgaguucuacccgugcaccagcgaggagaucgaccacgaggacaucaccaaggacaagaccuccacggucgaggccugccugccccuggagcucaccaagaacgagagcugccugaacucccgcgagaccagcuucaucaccaacggguccugccuggcgagccggaagacguccuucaugauggcccucugccugagcuccaucuacgaggaccugaagauguaccagguggaguucaagaccaugaacgccaagcuccugauggaccccaagcgccagaucuuccuggaccagaacaugcucgccgugaucgacgagcugaugcaggcgcugaacuucaacagcgagaccgucccccagaaguccagccucgaggagccggacuucuacaagaccaagaucaagcugugcauccugcuccacgccuuccggauccgcgccgugacgaucgaccgggugauguccuaccugaacgccagcuga

SEQ ID NO: 26 - RNA, 657 nt, Artificial Sequence
  IL12A(1-219) CDS mRNA opt1
augugccccgcccgcagccugcuccugguggccacccugguccuccuggaccaccugucccucgcgcggaaccugccgguggccacccccgaccccggcauguuccccugccugcaccacagccagaaccuccugcgcgccguguccaacaugcugcagaaggcccggcagacgcucgaguucuacccgugcaccagcgaggagaucgaccacgaggacaucaccaaggacaagaccuccacggucgaggccugccugccccuggagcucaccaagaacgagagcugccugaacucccgcgagaccagcuucaucaccaacggguccugccuggcgagccggaagacguccuucaugauggcccucugccugagcuccaucuacgaggaccugaagauguaccagguggaguucaagaccaugaacgccaagcuccugauggaccccaagcgccagaucuuccuggaccagaacaugcucgccgugaucgacgagcugaugcaggcgcugaacuucaacagcgagaccgucccccagaaguccagccucgaggagccggacuucuacaagaccaagaucaagcugugcauccugcuccacgccuuccggauccgcgccgugacgaucgaccgggugauguccuaccugaacgccagc

SEQ ID NO: 27 - RNA, 594 nt, Artificial Sequence
  IL12A(23-219) CDS mRNA opt1
cggaaccugccgguggccacccccgaccccggcauguuccccugccugcaccacagccagaaccuccugcgcgccguguccaacaugcugcagaaggcccggcagacgcucgaguucuacccgugcaccagcgaggagaucgaccacgaggacaucaccaaggacaagaccuccacggucgaggccugccugccccuggagcucaccaagaacgagagcugccugaacucccgcgagaccagcuucaucaccaacggguccugccuggcgagccggaagacguccuucaugauggcccucugccugagcuccaucuacgaggaccugaagauguaccagguggaguucaagaccaugaacgccaagcuccugauggaccccaagcgccagaucuuccuggaccagaacaugcucgccgugaucgacgagcugaugcaggcgcugaacuucaacagcgagaccgucccccagaaguccagccucgaggagccggacuucuacaagaccaagaucaagcugugcauccugcuccacgccuuccggauccgcgccgugacgaucgaccgggugauguccuaccugaacgccagcuga

SEQ ID NO: 28 - RNA, 987 nt, Artificial Sequence
  IL12B CDS mRNA opt1
augugccaccagcagcuggugaucagcugguucucccucgucuuccuggccagcccccugguggccaucugggagcucaagaaggacguguacgucguggagcuggacugguacccggacgcgcccggcgagauggugguccugaccugcgacacccccgaggaggacgggaucacguggacccucgaccaguccagcgaggugcugggcuccgggaagacccugaccauccaggugaaggaguucggcgacgccgggcaguacacgugccacaagggcggcgagguccucagccacucccugcugcuccugcacaagaaggaggacgggaucuggagcaccgacauccugaaggaccagaaggagcccaagaacaagaccuuccuccgcugcgaggccaagaacuacuccggccgguucacgugcugguggcugaccaccaucagcaccgaccugaccuucuccgucaagagcucccgcgggagcuccgacccgcagggcgugacgugcggggccgccacccucagcgcggagcgggugcgcggcgacaacaaggaguacgaguacuccguggagugccaggaggacagcgccugccccgccgccgaggagucccugcccaucgaggugauggucgacgcggugcacaagcugaaguacgagaacuacaccagcagcuucuucauccgggacaucaucaagcccgacccgcccaagaaccuccagcugaagccccugaagaacucccgccagguggaggucagcugggaguaccccgacaccugguccacgccgcacagcuacuucucccucaccuucugcguccaggugcagggcaagagcaagcgggagaagaaggaccgcguguucaccgacaagaccuccgccacggugaucugccggaagaacgccagcaucuccgugcgcgcccaggaccgguacuacagcuccagcugguccgagugggccagcguccccugcuccuga

SEQ ID NO: 29 - RNA, 984 nt, Artificial Sequence
  IL12B(1-328) CDS mRNA opt1
augugccaccagcagcuggugaucagcugguucucccucgucuuccuggccagcccccugguggccaucugggagcucaagaaggacguguacgucguggagcuggacugguacccggacgcgcccggcgagauggugguccugaccugcgacacccccgaggaggacgggaucacguggacccucgaccaguccagcgaggugcugggcuccgggaagacccugaccauccaggugaaggaguucggcgacgccgggcaguacacgugccacaagggcggcgagguccucagccacucccugcugcuccugcacaagaaggaggacgggaucuggagcaccgacauccugaaggaccagaaggagcccaagaacaagaccuuccuccgcugcgaggccaagaacuacuccggccgguucacgugcugguggcugaccaccaucagcaccgaccugaccuucuccgucaagagcucccgcgggagcuccgacccgcagggcgugacgugcggggccgccacccucagcgcggagcgggugcgcggcgacaacaaggaguacgaguacuccguggagugccaggaggacagcgccugccccgccgccgaggagucccugcccaucgaggugauggucgacgcggugcacaagcugaaguacgagaacuacaccagcagcuucuucauccgggacaucaucaagcccgacccgcccaagaaccuccagcugaagccccugaagaacucccgccagguggaggucagcugggaguaccccgacaccugguccacgccgcacagcuacuucucccucaccuucugcguccaggugcagggcaagagcaagcgggagaagaaggaccgcguguucaccgacaagaccuccgccacggugaucugccggaagaacgccagcaucuccgugcgcgcccaggaccgguacuacagcuccagcugguccgagugggccagcguccccugcucc

SEQ ID NO: 30 - RNA, 921 nt, Artificial Sequence
  IL12B(23-328) CDS mRNA opt1
aucugggagcucaagaaggacguguacgucguggagcuggacugguacccggacgcgcccggcgagauggugguccugaccugcgacacccccgaggaggacgggaucacguggacccucgaccaguccagcgaggugcugggcuccgggaagacccugaccauccaggugaaggaguucggcgacgccgggcaguacacgugccacaagggcggcgagguccucagccacucccugcugcuccugcacaagaaggaggacgggaucuggagcaccgacauccugaaggaccagaaggagcccaagaacaagaccuuccuccgcugcgaggccaagaacuacuccggccgguucacgugcugguggcugaccaccaucagcaccgaccugaccuucuccgucaagagcucccgcgggagcuccgacccgcagggcgugacgugcggggccgccacccucagcgcggagcgggugcgcggcgacaacaaggaguacgaguacuccguggagugccaggaggacagcgccugccccgccgccgaggagucccugcccaucgaggugauggucgacgcggugcacaagcugaaguacgagaacuacaccagcagcuucuucauccgggacaucaucaagcccgacccgcccaagaaccuccagcugaagccccugaagaacucccgccagguggaggucagcugggaguaccccgacaccugguccacgccgcacagcuacuucucccucaccuucugcguccaggugcagggcaagagcaagcgggagaagaaggaccgcguguucaccgacaagaccuccgccacggugaucugccggaagaacgccagcaucuccgugcgcgcccaggaccgguacuacagcuccagcugguccgagugggccagcguccccugcuccuga

SEQ ID NO: 31 - RNA, 54 nt, Artificial Sequence
  Linker-sFvCC49-218 CDS mRNA opt1
ggcagcaccuccgggagcggcaagcccggguccggcgaggggagcaccaagggc

SEQ ID NO: 32 - RNA, 1632 nt, Artificial Sequence
  IL12 CDS mRNA opt1
augugccaccagcagcuggugaucagcugguucucccucgucuuccuggccagcccccugguggccaucugggagcucaagaaggacguguacgucguggagcuggacugguacccggacgcgcccggcgagauggugguccugaccugcgacacccccgaggaggacgggaucacguggacccucgaccaguccagcgaggugcugggcuccgggaagacccugaccauccaggugaaggaguucggcgacgccgggcaguacacgugccacaagggcggcgagguccucagccacucccugcugcuccugcacaagaaggaggacgggaucuggagcaccgacauccugaaggaccagaaggagcccaagaacaagaccuuccuccgcugcgaggccaagaacuacuccggccgguucacgugcugguggcugaccaccaucagcaccgaccugaccuucuccgucaagagcucccgcgggagcuccgacccgcagggcgugacgugcggggccgccacccucagcgcggagcgggugcgcggcgacaacaaggaguacgaguacuccguggagugccaggaggacagcgccugccccgccgccgaggagucccugcccaucgaggugauggucgacgcggugcacaagcugaaguacgagaacuacaccagcagcuucuucauccgggacaucaucaagcccgacccgcccaagaaccuccagcugaagccccugaagaacucccgccagguggaggucagcugggaguaccccgacaccugguccacgccgcacagcuacuucucccucaccuucugcguccaggugcagggcaagagcaagcgggagaagaaggaccgcguguucaccgacaagaccuccgccacggugaucugccggaagaacgccagcaucuccgugcgcgcccaggaccgguacuacagcuccagcugguccgagugggccagcguccccugcuccggcagcaccuccgggagcggcaagcccggguccggcgaggggagcaccaagggccggaaccugccgguggccacccccgaccccggcauguuccccugccugcaccacagccagaaccuccugcgcgccguguccaacaugcugcagaaggcccggcagacgcucgaguucuacccgugcaccagcgaggagaucgaccacgaggacaucaccaaggacaagaccuccacggucgaggccugccugccccuggagcucaccaagaacgagagcugccugaacucccgcgagaccagcuucaucaccaacggguccugccuggcgagccggaagacguccuucaugauggcccucugccugagcuccaucuacgaggaccugaagauguaccagguggaguucaagaccaugaacgccaagcuccugauggaccccaagcgccagaucuuccuggaccagaacaugcucgccgugaucgacgagcugaugcaggcgcugaacuucaacagcgagaccgucccccagaaguccagccucgaggagccggacuucuacaagaccaagaucaagcugugcauccugcuccacgccuuccggauccgcgccgugacgaucgaccgggugauguccuaccugaacgccagcuga

SEQ ID NO: 33 - RNA, 786 nt, Artificial Sequence
  CD40LG CDS mRNA opt1
augaucgagaccuacaaccagaccagcccccgcuccgccgccacgggccugccgaucagcaugaagaucuucauguaccuccugaccguguuccugaucacccagaugaucggguccgcgcuguucgccgucuaccugcaccggcgccuggacaagaucgaggacgagcggaaccuccacgaggacuucguguucaugaagaccauccagcgcugcaacacgggcgagcggagccugucccugcucaacugcgaggagaucaagagccaguucgagggguucgugaaggacaucaugcugaacaaggaggagaccaagaaggagaacuccuucgagaugcagaagggcgaccagaacccccagaucgccgcccacgucaucagcgaggccuccagcaagaccaccuccgugcugcagugggcggagaagggguacuacacgaugagcaacaaccucgugacccuggagaacggcaagcagcugaccgucaagcgccagggccucuacuacaucuacgcccaggugaccuucugcuccaaccgggaggccagcucccaggcccccuucaucgcgagccugugccugaagucccccgggcgcuucgagcggauccuccugcgcgccgccaacacgcacagcuccgccaagccgugcggccagcagagcauccaccucgggggcguguucgagcuccagcccggggccagcgucuucgugaacgugaccgaccccucccaggucagccacggcaccggcuucaccuccuucgggcugcugaagcucuga

SEQ ID NO: 34 - RNA, 867 nt, Artificial Sequence
  PDCD1 CDS mRNA opt2
augcagaucccccaggcccccuggcccgucgucugggccguccuccagcucggcuggcgccccggcugguuccucgacucccccgaccgccccuggaacccccccaccuucucccccgcccuccucgucgucaccgagggcgacaacgccaccuucaccuguuccuucuccaacaccuccgaguccuucguccucaacugguaccgcaugucccccuccaaccagaccgacaagcucgccgccuuccccgaggaccgcucccagcccggccaggacugccgcuuccgcgucacccagcuccccaacggccgcgacuuccacauguccgucguccgcgcccgccgcaacgacuccggcaccuaccucugcggcgccaucucccucgcccccaaggcccagaucaaggagucccuccgcgccgagcuccgcgucaccgagcgccgcgccgagguccccaccgcccaccccucccccuccccccgccccgccggccaguuccagacccucgucgucggcgucgucggcggccuccucggcucccucguccuccucgucuggguccucgccgucaucugcucccgcgccgcccgcggcaccaucggcgcccgccgcaccggccagccccucaaggaggaccccuccgccguccccgucuucuccgucgacuacggcgagcucgacuuccaguggcgcgagaagacccccgagccccccguccccugcguccccgagcagaccgaguacgccaccaucgucuuccccuccggcaugggcaccuccucccccgcccgccgcggcuccgccgacggcccccgcuccgcccagccccuccgccccgaggacggccacugcuccuggccccucuga

SEQ ID NO: 35 - RNA, 450 nt, Artificial Sequence
  PDCD1(1-149) CDS mRNA opt2
augcagaucccccaggcccccuggcccgucgucugggccguccuccagcucggcuggcgccccggcugguuccucgacucccccgaccgccccuggaacccccccaccuucucccccgcccuccucgucgucaccgagggcgacaacgccaccuucaccuguuccuucuccaacaccuccgaguccuucguccucaacugguaccgcaugucccccuccaaccagaccgacaagcucgccgccuuccccgaggaccgcucccagcccggccaggacugccgcuuccgcgucacccagcuccccaacggccgcgacuuccacauguccgucguccgcgcccgccgcaacgacuccggcaccuaccucugcggcgccaucucccucgcccccaaggcccagaucaaggagucccuccgcgccgagcuccgcgucaccgagcgccgcgccuga

SEQ ID NO: 36 - RNA, 660 nt, Artificial Sequence
  IL12A CDS mRNA opt2
augugccccgcccgcucccuccuccucgucgccacccucguccuccucgaccaccucucccucgcccgcaaccuccccgucgccacccccgaccccggcauguuccccugccuccaccacucccagaaccuccuccgcgccgucuccaacaugcuccagaaggcccgccagacccucgaguucuaccccugcaccuccgaggagaucgaccacgaggacaucaccaaggacaagaccuccaccgucgaggccugccucccccucgagcucaccaagaacgaguccugccucaacucccgcgagaccuccuucaucaccaacggcuccugccucgccucccgcaagaccuccuucaugauggcccucugccucuccuccaucuacgaggaccucaagauguaccaggucgaguucaagaccaugaacgccaagcuccucauggaccccaagcgccagaucuuccucgaccagaacaugcucgccgucaucgacgagcucaugcaggcccucaacuucaacuccgagaccgucccccagaaguccucccucgaggagcccgacuucuacaagaccaagaucaagcucugcauccuccuccacgccuuccgcauccgcgccgucaccaucgaccgcgucauguccuaccucaacgccuccuga

SEQ ID NO: 37 - RNA, 657 nt, Artificial Sequence
  IL12A(1-219) CDS mRNA opt2
augugccccgcccgcucccuccuccucgucgccacccucguccuccucgaccaccucucccucgcccgcaaccuccccgucgccacccccgaccccggcauguuccccugccuccaccacucccagaaccuccuccgcgccgucuccaacaugcuccagaaggcccgccagacccucgaguucuaccccugcaccuccgaggagaucgaccacgaggacaucaccaaggacaagaccuccaccgucgaggccugccucccccucgagcucaccaagaacgaguccugccucaacucccgcgagaccuccuucaucaccaacggcuccugccucgccucccgcaagaccuccuucaugauggcccucugccucuccuccaucuacgaggaccucaagauguaccaggucgaguucaagaccaugaacgccaagcuccucauggaccccaagcgccagaucuuccucgaccagaacaugcucgccgucaucgacgagcucaugcaggcccucaacuucaacuccgagaccgucccccagaaguccucccucgaggagcccgacuucuacaagaccaagaucaagcucugcauccuccuccacgccuuccgcauccgcgccgucaccaucgaccgcgucauguccuaccucaacgccucc

SEQ ID NO: 38 - RNA, 594 nt, Artificial Sequence
  IL12A(23-219) CDS mRNA opt2
cgcaaccuccccgucgccacccccgaccccggcauguuccccugccuccaccacucccagaaccuccuccgcgccgucuccaacaugcuccagaaggcccgccagacccucgaguucuaccccugcaccuccgaggagaucgaccacgaggacaucaccaaggacaagaccuccaccgucgaggccugccucccccucgagcucaccaagaacgaguccugccucaacucccgcgagaccuccuucaucaccaacggcuccugccucgccucccgcaagaccuccuucaugauggcccucugccucuccuccaucuacgaggaccucaagauguaccaggucgaguucaagaccaugaacgccaagcuccucauggaccccaagcgccagaucuuccucgaccagaacaugcucgccgucaucgacgagcucaugcaggcccucaacuucaacuccgagaccgucccccagaaguccucccucgaggagcccgacuucuacaagaccaagaucaagcucugcauccuccuccacgccuuccgcauccgcgccgucaccaucgaccgcgucauguccuaccucaacgccuccuga

SEQ ID NO: 39 - RNA, 987 nt, Artificial Sequence
  IL12B CDS mRNA opt2
augugccaccagcagcucgucaucuccugguucucccucgucuuccucgccuccccccucgucgccaucugggagcucaagaaggacgucuacgucgucgagcucgacugguaccccgacgcccccggcgagauggucguccucaccugugacacccccgaggaggacggcaucaccuggacccucgaccaguccuccgagguccucggcuccggcaagacccucaccauccaggucaaggaguucggcgacgccggccaguacaccugucacaagggcggcgagguccucucccacucccuccuccuccuccacaagaaggaggacggcaucugguccaccgacauccucaaggaccagaaggagcccaagaacaagaccuuccuccgcugcgaggccaagaacuacuccggccgcuucaccuguugguggcucaccaccaucuccaccgaccucaccuucuccgucaaguccucccgcggcuccuccgacccccagggcgucaccuguggcgccgccacccucuccgccgagcgcguccgcggcgacaacaaggaguacgaguacuccgucgagugccaggaggacuccgccugccccgccgccgaggagucccuccccaucgaggucauggucgacgccguccacaagcucaaguacgagaacuacaccuccuccuucuucauccgcgacaucaucaagcccgacccccccaagaaccuccagcucaagccccucaagaacucccgccaggucgaggucuccugggaguaccccgacaccugguccaccccccacuccuacuucucccucaccuucugcguccagguccagggcaaguccaagcgcgagaagaaggaccgcgucuucaccgacaagaccuccgccaccgucaucugccgcaagaacgccuccaucuccguccgcgcccaggaccgcuacuacuccuccuccugguccgagugggccuccguccccugcuccuga

SEQ ID NO: 40 - RNA, 984 nt, Artificial Sequence
  IL12B(1-328) CDS mRNA opt2
augugccaccagcagcucgucaucuccugguucucccucgucuuccucgccuccccccucgucgccaucugggagcucaagaaggacgucuacgucgucgagcucgacugguaccccgacgcccccggcgagauggucguccucaccugugacacccccgaggaggacggcaucaccuggacccucgaccaguccuccgagguccucggcuccggcaagacccucaccauccaggucaaggaguucggcgacgccggccaguacaccugucacaagggcggcgagguccucucccacucccuccuccuccuccacaagaaggaggacggcaucugguccaccgacauccucaaggaccagaaggagcccaagaacaagaccuuccuccgcugcgaggccaagaacuacuccggccgcuucaccuguugguggcucaccaccaucuccaccgaccucaccuucuccgucaaguccucccgcggcuccuccgacccccagggcgucaccuguggcgccgccacccucuccgccgagcgcguccgcggcgacaacaaggaguacgaguacuccgucgagugccaggaggacuccgccugccccgccgccgaggagucccuccccaucgaggucauggucgacgccguccacaagcucaaguacgagaacuacaccuccuccuucuucauccgcgacaucaucaagcccgacccccccaagaaccuccagcucaagccccucaagaacucccgccaggucgaggucuccugggaguaccccgacaccugguccaccccccacuccuacuucucccucaccuucugcguccagguccagggcaaguccaagcgcgagaagaaggaccgcgucuucaccgacaagaccuccgccaccgucaucugccgcaagaacgccuccaucuccguccgcgcccaggaccgcuacuacuccuccuccugguccgagugggccuccguccccugcucc

SEQ ID NO: 41 - RNA, 921 nt, Artificial Sequence
  IL12B(23-328) CDS mRNA opt2
aucugggagcucaagaaggacgucuacgucgucgagcucgacugguaccccgacgcccccggcgagauggucguccucaccugugacacccccgaggaggacggcaucaccuggacccucgaccaguccuccgagguccucggcuccggcaagacccucaccauccaggucaaggaguucggcgacgccggccaguacaccugucacaagggcggcgagguccucucccacucccuccuccuccuccacaagaaggaggacggcaucugguccaccgacauccucaaggaccagaaggagcccaagaacaagaccuuccuccgcugcgaggccaagaacuacuccggccgcuucaccuguugguggcucaccaccaucuccaccgaccucaccuucuccgucaaguccucccgcggcuccuccgacccccagggcgucaccuguggcgccgccacccucuccgccgagcgcguccgcggcgacaacaaggaguacgaguacuccgucgagugccaggaggacuccgccugccccgccgccgaggagucccuccccaucgaggucauggucgacgccguccacaagcucaaguacgagaacuacaccuccuccuucuucauccgcgacaucaucaagcccgacccccccaagaaccuccagcucaagccccucaagaacucccgccaggucgaggucuccugggaguaccccgacaccugguccaccccccacuccuacuucucccucaccuucugcguccagguccagggcaaguccaagcgcgagaagaaggaccgcgucuucaccgacaagaccuccgccaccgucaucugccgcaagaacgccuccaucuccguccgcgcccaggaccgcuacuacuccuccuccugguccgagugggccuccguccccugcuccuga

SEQ ID NO: 42 - RNA, 54 nt, Artificial Sequence
  Linker-sFvCC49-218 CDS mRNA opt2
ggcuccaccuccggcuccggcaagcccggcuccggcgagggcuccaccaagggc

SEQ ID NO: 43 - RNA, 1632 nt, Artificial Sequence
  IL12 CDS mRNA opt2
augugccaccagcagcucgucaucuccugguucucccucgucuuccucgccuccccccucgucgccaucugggagcucaagaaggacgucuacgucgucgagcucgacugguaccccgacgcccccggcgagauggucguccucaccugugacacccccgaggaggacggcaucaccuggacccucgaccaguccuccgagguccucggcuccggcaagacccucaccauccaggucaaggaguucggcgacgccggccaguacaccugucacaagggcggcgagguccucucccacucccuccuccuccuccacaagaaggaggacggcaucugguccaccgacauccucaaggaccagaaggagcccaagaacaagaccuuccuccgcugcgaggccaagaacuacuccggccgcuucaccuguugguggcucaccaccaucuccaccgaccucaccuucuccgucaaguccucccgcggcuccuccgacccccagggcgucaccuguggcgccgccacccucuccgccgagcgcguccgcggcgacaacaaggaguacgaguacuccgucgagugccaggaggacuccgccugccccgccgccgaggagucccuccccaucgaggucauggucgacgccguccacaagcucaaguacgagaacuacaccuccuccuucuucauccgcgacaucaucaagcccgacccccccaagaaccuccagcucaagccccucaagaacucccgccaggucgaggucuccugggaguaccccgacaccugguccaccccccacuccuacuucucccucaccuucugcguccagguccagggcaaguccaagcgcgagaagaaggaccgcgucuucaccgacaagaccuccgccaccgucaucugccgcaagaacgccuccaucuccguccgcgcccaggaccgcuacuacuccuccuccugguccgagugggccuccguccccugcuccggcuccaccuccggcuccggcaagcccggcuccggcgagggcuccaccaagggccgcaaccuccccgucgccacccccgaccccggcauguuccccugccuccaccacucccagaaccuccuccgcgccgucuccaacaugcuccagaaggcccgccagacccucgaguucuaccccugcaccuccgaggagaucgaccacgaggacaucaccaaggacaagaccuccaccgucgaggccugccucccccucgagcucaccaagaacgaguccugccucaacucccgcgagaccuccuucaucaccaacggcuccugccucgccucccgcaagaccuccuucaugauggcccucugccucuccuccaucuacgaggaccucaagauguaccaggucgaguucaagaccaugaacgccaagcuccucauggaccccaagcgccagaucuuccucgaccagaacaugcucgccgucaucgacgagcucaugcaggcccucaacuucaacuccgagaccgucccccagaaguccucccucgaggagcccgacuucuacaagaccaagaucaagcucugcauccuccuccacgccuuccgcauccgcgccgucaccaucgaccgcgucauguccuaccucaacgccuccuga

SEQ ID NO: 44 - RNA, 786 nt, Artificial Sequence
  CD40LG CDS mRNA opt2
augaucgagaccuacaaccagaccuccccccgcuccgccgccaccggccuccccaucuccaugaagaucuucauguaccuccucaccgucuuccucaucacccagaugaucggcuccgcccucuucgccgucuaccuccaccgccgccucgacaagaucgaggacgagcgcaaccuccacgaggacuucgucuucaugaagaccauccagcgcugcaacaccggcgagcgcucccucucccuccucaacugcgaggagaucaagucccaguucgagggcuucgucaaggacaucaugcucaacaaggaggagaccaagaaggagaacuccuucgagaugcagaagggcgaccagaacccccagaucgccgcccacgucaucuccgaggccuccuccaagaccaccuccguccuccagugggccgagaagggcuacuacaccauguccaacaaccucgucacccucgagaacggcaagcagcucaccgucaagcgccagggccucuacuacaucuacgcccaggucaccuucugcuccaaccgcgaggccuccucccaggcccccuucaucgccucccucugccucaagucccccggccgcuucgagcgcauccuccuccgcgccgccaacacccacuccuccgccaagcccugcggccagcaguccauccaccucggcggcgucuucgagcuccagcccggcgccuccgucuucgucaacgucaccgaccccucccaggucucccacggcaccggcuucaccuccuucggccuccucaagcucuga

SEQ ID NO: 45 - RNA, 867 nt, Artificial Sequence
  PDCD1 CDS mRNA opt3
augcagaucccccaagccccuuggccaguggucugggcuguucugcagcucggcuggagaccggggugguuccuugacagccccgauaggccuuggaacccacccaccuuuuccccugcacuguuggugguaacagagggagacaaugccacuuucacgugcucuuuuucaaacaccagugagagcuucguguuaaauugguaccggauguccccaucuaaccagacagauaagcuggcggcuuuucccgaagaccgcucgcagccuggucaagauugucgauuccgugucacucagcuaccaaauggcagagacuuucacaugucagugguuagggcccggcgcaacgauagcgggaccuaucucugcggagcaauuagucuggccccgaaagcucagauaaaggaaucccuuagagcagagcugagggugacagaacggcgcgccgagguccccaccgcucauccuucuccaagcccccgaccugccggccaguuccaaacuuuggugguagguguugucgggggacuccugggcucccuggugcucuuagugugggugcuggcggucaucuguucaagagcagccaggggcacaauuggggcucggcguaccggacagccacuuaaagaggaccccagugccguuccgguguuuagcguagauuacggugaauuggacuuccaguggcgcgagaagacgccugaacccccagugccuugcguccccgagcagacugaguaugcaaccaucguguuuccaucuggcauggggacauccucacccgcuagaaggggaagcgccgauggcccucggagugcgcaaccacugcgaccggaagacggucacuguucuuggccccuauga

SEQ ID NO: 46 - RNA, 450 nt, Artificial Sequence
  PDCD1(1-149) CDS mRNA opt3
augcagaucccccaagccccuuggccaguggucugggcuguucugcagcucggcuggagaccggggugguuccuugacagccccgauaggccuuggaacccacccaccuuuuccccugcacuguuggugguaacagagggagacaaugccacuuucacgugcucuuuuucaaacaccagugagagcuucguguuaaauugguaccggauguccccaucuaaccagacagauaagcuggcggcuuuucccgaagaccgcucgcagccuggucaagauugucgauuccgugucacucagcuaccaaauggcagagacuuucacaugucagugguuagggcccggcgcaacgauagcgggaccuaucucugcggagcaauuagucuggccccgaaagcucagauaaaggaaucccuuagagcagagcugagggugacagaacggcgcgccuga

SEQ ID NO: 47 - RNA, 660 nt, Artificial Sequence
  IL12A CDS mRNA opt3
augugccccgccagaagccugcuccuuguggcuacccuggucuuguuagaccaccugucccuagcaaggaaccucccuguugccacaccagauccgggcauguuccccugucugcaucacucucagaaucuucugcgggcggugucaaacauguugcaaaaggcucgccagacucucgaguuuuacccuugcacgagugaagagaucgaccaugaagauauuaccaaagacaagacaagcacuguagaggccugucugccacuggaacucaccaaaaaugaguccugcuuaaacucucgagagacaucguucauaaccaaugggucaugucuggcaagccguaagacaaguuuuaugauggcccuuugcuuguccucuaucuaugaagaucugaaaauguaccagguggaguucaagacuaugaacgcuaagcuacucauggaccccaaaagacagauuuuucuggaucaaaauaugcuugcagucaucgacgaacugaugcaggccuugaacuucaauagcgagaccgugccucagaaguccucacucgaggaaccagauuuuuauaaaacgaagauuaaacuguguaucuuacugcacgcuuucaggauacgggccguuacuaucgaccgcgugaugaguuaccucaacgcgagcuga

SEQ ID NO: 48 - RNA, 657 nt, Artificial Sequence
  IL12A(1-219) CDS mRNA opt3
augugccccgccagaagccugcuccuuguggcuacccuggucuuguuagaccaccugucccuagcaaggaaccucccuguugccacaccagauccgggcauguuccccugucugcaucacucucagaaucuucugcgggcggugucaaacauguugcaaaaggcucgccagacucucgaguuuuacccuugcacgagugaagagaucgaccaugaagauauuaccaaagacaagacaagcacuguagaggccugucugccacuggaacucaccaaaaaugaguccugcuuaaacucucgagagacaucguucauaaccaaugggucaugucuggcaagccguaagacaaguuuuaugauggcccuuugcuuguccucuaucuaugaagaucugaaaauguaccagguggaguucaagacuaugaacgcuaagcuacucauggaccccaaaagacagauuuuucuggaucaaaauaugcuugcagucaucgacgaacugaugcaggccuugaacuucaauagcgagaccgugccucagaaguccucacucgaggaaccagauuuuuauaaaacgaagauuaaacuguguaucuuacugcacgcuuucaggauacgggccguuacuaucgaccgcgugaugaguuaccucaacgcgagc

SEQ ID NO: 49 - RNA, 594 nt, Artificial Sequence
  IL12A(23-219) CDS mRNA opt3
aggaaccucccuguugccacaccagauccgggcauguuccccugucugcaucacucucagaaucuucugcgggcggugucaaacauguugcaaaaggcucgccagacucucgaguuuuacccuugcacgagugaagagaucgaccaugaagauauuaccaaagacaagacaagcacuguagaggccugucugccacuggaacucaccaaaaaugaguccugcuuaaacucucgagagacaucguucauaaccaaugggucaugucuggcaagccguaagacaaguuuuaugauggcccuuugcuuguccucuaucuaugaagaucugaaaauguaccagguggaguucaagacuaugaacgcuaagcuacucauggaccccaaaagacagauuuuucuggaucaaaauaugcuugcagucaucgacgaacugaugcaggccuugaacuucaauagcgagaccgugccucagaaguccucacucgaggaaccagauuuuuauaaaacgaagauuaaacuguguaucuuacugcacgcuuucaggauacgggccguuacuaucgaccgcgugaugaguuaccucaacgcgagcuga

SEQ ID NO: 50 - RNA, 987 nt, Artificial Sequence
  IL12B CDS mRNA opt3
augugccaccagcaacuggugaucagcugguucucccucgucuuucuugccucuccccugguugcuauuugggaguugaagaaagacguguacguaguggaauuagauugguauccugacgcaccaggcgagauggucgugcugaccugugauacaccggaagaggacgggauaacuuggacgcuagaucagucaagugaaguucucggaagcgguaagacccugacaauccaggugaaagaguucggcgacgccgggcaguacacuugccauaagggaggcgagguccuuucccacucucuguugcuccugcauaaaaaggaagaugguauuuggucgaccgacauccugaaggaucaaaaagagcccaagaacaaaacauuucucagaugugaagcgaagaauuauucagggagguuuaccugcuggugguuaacuacaauuagcaccgaccugacguucagugugaaauccucucggggaagcuccgauccucagggcguaacuuguggcgcugccacccuuucagcagagcgcguucgaggggacaacaaggaguacgaauauaguguggagugccaggaagauagcgccuguccagcugcagaggaaucuuugcccaucgaggucaugguggacgccgugcacaagcugaaauacgagaauuauacauccucauucuuuauacgugacaucauuaagccugauccacccaaaaaccuacagcucaagccucugaaaaauagcagacaagucgaaguuaguugggaguacccagacacuuggucuaccccgcauuccuacuucagccuuacauuuugcgugcagguacagggaaagucgaaaagggaaaagaaggaucggguguucaccgacaaaacgucugcuacugucaucugucgcaagaacgccuccauuucagugagagcgcaggauagguauuacaguagcuccuggucugagugggcaagcguucccugcucauga

SEQ ID NO: 51 - RNA, 984 nt, Artificial Sequence
  IL12B(1-328) CDS mRNA opt3
augugccaccagcaacuggugaucagcugguucucccucgucuuucuugccucuccccugguugcuauuugggaguugaagaaagacguguacguaguggaauuagauugguauccugacgcaccaggcgagauggucgugcugaccugugauacaccggaagaggacgggauaacuuggacgcuagaucagucaagugaaguucucggaagcgguaagacccugacaauccaggugaaagaguucggcgacgccgggcaguacacuugccauaagggaggcgagguccuuucccacucucuguugcuccugcauaaaaaggaagaugguauuuggucgaccgacauccugaaggaucaaaaagagcccaagaacaaaacauuucucagaugugaagcgaagaauuauucagggagguuuaccugcuggugguuaacuacaauuagcaccgaccugacguucagugugaaauccucucggggaagcuccgauccucagggcguaacuuguggcgcugccacccuuucagcagagcgcguucgaggggacaacaaggaguacgaauauaguguggagugccaggaagauagcgccuguccagcugcagaggaaucuuugcccaucgaggucaugguggacgccgugcacaagcugaaauacgagaauuauacauccucauucuuuauacgugacaucauuaagccugauccacccaaaaaccuacagcucaagccucugaaaaauagcagacaagucgaaguuaguugggaguacccagacacuuggucuaccccgcauuccuacuucagccuuacauuuugcgugcagguacagggaaagucgaaaagggaaaagaaggaucggguguucaccgacaaaacgucugcuacugucaucugucgcaagaacgccuccauuucagugagagcgcaggauagguauuacaguagcuccuggucugagugggcaagcguucccugcuca

SEQ ID NO: 52 - RNA, 921 nt, Artificial Sequence
  IL12B(23-328) CDS mRNA opt3
auuugggaguugaagaaagacguguacguaguggaauuagauugguauccugacgcaccaggcgagauggucgugcugaccugugauacaccggaagaggacgggauaacuuggacgcuagaucagucaagugaaguucucggaagcgguaagacccugacaauccaggugaaagaguucggcgacgccgggcaguacacuugccauaagggaggcgagguccuuucccacucucuguugcuccugcauaaaaaggaagaugguauuuggucgaccgacauccugaaggaucaaaaagagcccaagaacaaaacauuucucagaugugaagcgaagaauuauucagggagguuuaccugcuggugguuaacuacaauuagcaccgaccugacguucagugugaaauccucucggggaagcuccgauccucagggcguaacuuguggcgcugccacccuuucagcagagcgcguucgaggggacaacaaggaguacgaauauaguguggagugccaggaagauagcgccuguccagcugcagaggaaucuuugcccaucgaggucaugguggacgccgugcacaagcugaaauacgagaauuauacauccucauucuuuauacgugacaucauuaagccugauccacccaaaaaccuacagcucaagccucugaaaaauagcagacaagucgaaguuaguugggaguacccagacacuuggucuaccccgcauuccuacuucagccuuacauuuugcgugcagguacagggaaagucgaaaagggaaaagaaggaucggguguucaccgacaaaacgucugcuacugucaucugucgcaagaacgccuccauuucagugagagcgcaggauagguauuacaguagcuccuggucugagugggcaagcguucccugcucauga

SEQ ID NO: 53 - RNA, 54 nt, Artificial Sequence
  Linker-sFvCC49-218 CDS mRNA opt3
ggcagcaccuccgggucuggaaagcccgguucaggcgaggggaguacaaaagga

SEQ ID NO: 54 - RNA, 1632 nt, Artificial Sequence
  IL12 CDS mRNA opt3
augugccaccagcaacuggugaucagcugguucucccucgucuuucuugccucuccccugguugcuauuugggaguugaagaaagacguguacguaguggaauuagauugguauccugacgcaccaggcgagauggucgugcugaccugugauacaccggaagaggacgggauaacuuggacgcuagaucagucaagugaaguucucggaagcgguaagacccugacaauccaggugaaagaguucggcgacgccgggcaguacacuugccauaagggaggcgagguccuuucccacucucuguugcuccugcauaaaaaggaagaugguauuuggucgaccgacauccugaaggaucaaaaagagcccaagaacaaaacauuucucagaugugaagcgaagaauuauucagggagguuuaccugcuggugguuaacuacaauuagcaccgaccugacguucagugugaaauccucucggggaagcuccgauccucagggcguaacuuguggcgcugccacccuuucagcagagcgcguucgaggggacaacaaggaguacgaauauaguguggagugccaggaagauagcgccuguccagcugcagaggaaucuuugcccaucgaggucaugguggacgccgugcacaagcugaaauacgagaauuauacauccucauucuuuauacgugacaucauuaagccugauccacccaaaaaccuacagcucaagccucugaaaaauagcagacaagucgaaguuaguugggaguacccagacacuuggucuaccccgcauuccuacuucagccuuacauuuugcgugcagguacagggaaagucgaaaagggaaaagaaggaucggguguucaccgacaaaacgucugcuacugucaucugucgcaagaacgccuccauuucagugagagcgcaggauagguauuacaguagcuccuggucugagugggcaagcguucccugcucaggcagcaccuccgggucuggaaagcccgguucaggcgaggggaguacaaaaggaaggaaccucccuguugccacaccagauccgggcauguuccccugucugcaucacucucagaaucuucugcgggcggugucaaacauguugcaaaaggcucgccagacucucgaguuuuacccuugcacgagugaagagaucgaccaugaagauauuaccaaagacaagacaagcacuguagaggccugucugccacuggaacucaccaaaaaugaguccugcuuaaacucucgagagacaucguucauaaccaaugggucaugucuggcaagccguaagacaaguuuuaugauggcccuuugcuuguccucuaucuaugaagaucugaaaauguaccagguggaguucaagacuaugaacgcuaagcuacucauggaccccaaaagacagauuuuucuggaucaaaauaugcuugcagucaucgacgaacugaugcaggccuugaacuucaauagcgagaccgugccucagaaguccucacucgaggaaccagauuuuuauaaaacgaagauuaaacuguguaucuuacugcacgcuuucaggauacgggccguuacuaucgaccgcgugaugaguuaccucaacgcgagcuga

SEQ ID NO: 55 - RNA, 786 nt, Artificial Sequence
  CD40LG CDS mRNA opt3
augaucgagaccuacaaccagacaagccccagauccgccgcuacuggccugccuauuucuaugaagauauucauguaucuccuuacgguguuucugaucacccaaaugauugggucagcauuguucgccgucuacuuacacaggcggcuggacaaaaucgaagaugagcgcaaucuacaugaagacuuuguuuucaugaagacaauucagcgaugcaacacuggagagcguagucucagccugcuuaauugugaagagaucaaaucccaguuugaggguuucgugaaggauauaaugcugaacaaagaagagaccaagaaggaaaauucuuuugagaugcagaaaggcgaccaaaacccacagaucgcggcucacguaauuucggaggccucaagcaagacaaccaguguguugcagugggcagaaaaaggguauuacacuauguccaauaaccucgucacacuggagaauggaaagcagcugaccgugaaaagacaaggccucuauuacaucuaugcccagguuacguucugcucuaacagggaagcuagcucccaggcaccguuuauugccucauuaugucugaagagucccggucgguucgagcgcauccuuuugagagcugccaauacucauagcucugcgaagccuugcgggcagcaauccauacaccugggaggcguguuugaacuacagccaggcgcaucagucuucgugaacguaaccgaucccagccagguuagucaugggacaggauuuacuucuuucggucuccugaaacuuuga

SEQ ID NO: 56 - RNA, 867 nt, Artificial Sequence
  PDCD1 CDS mRNA opt3v
augcagaucccucaggcuccuuggccuguugugugggcuguucugcaacuuggauggcggccuggcugguuccuggacucuccugacagacccuggaauccuccaacauucagccccgcucugcuggugguuaccgagggcgauaaugccaccuucaccuguagcuucagcaacaccagcgagagcuucgugcugaacugguacagaaugagccccagcaaccagaccgacaagcuggccgccuuuccugaggauagaucucagcccggccaggacugccgguucagaguuacacagcugcccaacggccgggacuuccacaugucugucguccgggccagaagaaacgacagcggcacauaucugugcggcgccauuucucuggccccuaaggcucagaucaaagagagccugagagccgagcugagagugacagaaagacgggccgaagugcccacagcucacccuucaccuucuccaagaccugccggccaguuccagacacuggucgugggaguuguuggcggacugcugggaucucuggugcugcuuguuugggugcucgccgugaucuguagcagagccgccagaggaacaaucggcgccagaaggacaggccagccucugaaagaggaucccucugcuguccccguguucagcguggacuauggcgagcuggauuuccaguggcgggaaaagacacccgagccuccagugccuugugugccugagcagacagaguacgccaccaucguguucccuagcggcaugggcacaucuagcccugccagaagaggaucugccgacggaccuagaucugcccagccucucagaccugaggauggccacuguagcuggccucuguaa

SEQ ID NO: 57 - RNA, 450 nt, Artificial Sequence
  PDCD1(1-149) CDS mRNA opt3v
augcagaucccucaggcuccuuggccuguugugugggcuguucugcaacuuggauggcggccuggcugguuccuggacucuccugacagacccuggaauccuccaacauucagccccgcucugcuggugguuaccgagggcgauaaugccaccuucaccuguagcuucagcaacaccagcgagagcuucgugcugaacugguacagaaugagccccagcaaccagaccgacaagcuggccgccuuuccugaggauagaucucagcccggccaggacugccgguucagaguuacacagcugcccaacggccgggacuuccacaugucugucguccgggccagaagaaacgacagcggcacauaucugugcggcgccauuucucuggccccuaaggcucagaucaaagagagccugagagccgagcugagagugacagaaagacgggccuga

SEQ ID NO: 58 - RNA, 660 nt, Artificial Sequence
  IL12A CDS mRNA opt3v
augugcccugccagaucucugcugcugguggcuacacuggugcugcuggaucaucugagccuggccagaaaccugccaguggccacgccugauccuggcauguuuccuugucugcaccacagccagaaccugcugagagccguguccaacaugcugcagaaggccagacagacccucgaguucuaccccugcaccagcgaggaaaucgaccacgaggacaucaccaaggacaagaccagcaccguggaagccugccugccucuggaacugaccaagaacgagagcugccugaacagccgggaaaccagcuucaucaccaacggcucuugccuggccuccagaaagaccuccuucaugauggcccugugccugagcagcaucuacgaggaccugaagauguaccaggucgaguucaagaccaugaacgccaagcugcugauggaccccaagcggcagaucuuccuggaccagaauaugcuggccgugaucgacgagcugaugcaggcccugaacuucaacagcgagacagugccccagaaguccagccuggaagaacccgacuucuacaagaccaagaucaagcugugcauccugcugcacgccuuccggaucagagccgugaccaucgacagagugaugagcuaccugaacgccuccuga

SEQ ID NO: 59 - RNA, 657 nt, Artificial Sequence
  IL12A(1-219) CDS mRNA opt3v
augugcccugccagaucucugcugcugguggcuacacuggugcugcuggaucaucugagccuggccagaaaccugccaguggccacgccugauccuggcauguuuccuugucugcaccacagccagaaccugcugagagccguguccaacaugcugcagaaggccagacagacccucgaguucuaccccugcaccagcgaggaaaucgaccacgaggacaucaccaaggacaagaccagcaccguggaagccugccugccucuggaacugaccaagaacgagagcugccugaacagccgggaaaccagcuucaucaccaacggcucuugccuggccuccagaaagaccuccuucaugauggcccugugccugagcagcaucuacgaggaccugaagauguaccaggucgaguucaagaccaugaacgccaagcugcugauggaccccaagcggcagaucuuccuggaccagaauaugcuggccgugaucgacgagcugaugcaggcccugaacuucaacagcgagacagugccccagaaguccagccuggaagaacccgacuucuacaagaccaagaucaagcugugcauccugcugcacgccuuccggaucagagccgugaccaucgacagagugaugagcuaccugaacgccucc

SEQ ID NO: 60 - RNA, 594 nt, Artificial Sequence
  IL12A(23-219) CDS mRNA opt3v
agaaaccugccaguggccacgccugauccuggcauguuuccuugucugcaccacagccagaaccugcugagagccguguccaacaugcugcagaaggccagacagacccucgaguucuaccccugcaccagcgaggaaaucgaccacgaggacaucaccaaggacaagaccagcaccguggaagccugccugccucuggaacugaccaagaacgagagcugccugaacagccgggaaaccagcuucaucaccaacggcucuugccuggccuccagaaagaccuccuucaugauggcccugugccugagcagcaucuacgaggaccugaagauguaccaggucgaguucaagaccaugaacgccaagcugcugauggaccccaagcggcagaucuuccuggaccagaauaugcuggccgugaucgacgagcugaugcaggcccugaacuucaacagcgagacagugccccagaaguccagccuggaagaacccgacuucuacaagaccaagaucaagcugugcauccugcugcacgccuuccggaucagagccgugaccaucgacagagugaugagcuaccugaacgccuccuga

SEQ ID NO: 61 - RNA, 987 nt, Artificial Sequence
  IL12B CDS mRNA opt3v
augugucaccagcagcuggucaucagcugguucagccugguguuccuggccucuccucugguggccaucugggagcugaagaaagacguguacgugguggaacuggacugguaucccgaugcuccuggcgagaugguggugcugaccugcgauaccccugaagaggacggcaucaccuggacacuggaucagucuagcgaggugcucggcagcggcaagacccugaccauccaagugaaagaguuuggcgacgccggccaguacaccugucacaaaggcggagaagugcugagccacagccugcugcugcuccacaagaaagaggauggcauuuggagcaccgacauccugaaggaccagaaagagcccaagaacaagaccuuccugagaugcgaggccaagaacuacagcggccgguucacauguugguggcugaccaccaucagcaccgaccugaccuucagcgugaaguccagcagaggcagcagugauccucagggcguuacauguggcgccgcuacacugucugccgaaagagugcggggcgacaacaaagaauacgaguacagcguggaaugccaagaggacagcgccuguccagccgccgaagagucucugccuaucgaagugaugguggacgccgugcacaagcugaaguacgagaacuacaccuccagcuuuuucauccgggacaucaucaagcccgauccuccaaagaaccugcagcugaagccucugaagaacagcagacagguggaaguguccugggaguaccccgacaccuggucuacaccccacagcuacuucagccugaccuuuugcgugcaagugcagggcaaguccaagcgcgagaaaaaggaccggguguucaccgacaagaccagcgccaccgugaucugcagaaagaacgccagcaucagcgucagagcccaggaccgguacuacagcagcucuuggagcgaaugggccagcgugccauguagcuaa

SEQ ID NO: 62 - RNA, 984 nt, Artificial Sequence
  IL12B(1-328) CDS mRNA opt3v
augugucaccagcagcuggucaucagcugguucagccugguguuccuggccucuccucugguggccaucugggagcugaagaaagacguguacgugguggaacuggacugguaucccgaugcuccuggcgagaugguggugcugaccugcgauaccccugaagaggacggcaucaccuggacacuggaucagucuagcgaggugcucggcagcggcaagacccugaccauccaagugaaagaguuuggcgacgccggccaguacaccugucacaaaggcggagaagugcugagccacagccugcugcugcuccacaagaaagaggauggcauuuggagcaccgacauccugaaggaccagaaagagcccaagaacaagaccuuccugagaugcgaggccaagaacuacagcggccgguucacauguugguggcugaccaccaucagcaccgaccugaccuucagcgugaaguccagcagaggcagcagugauccucagggcguuacauguggcgccgcuacacugucugccgaaagagugcggggcgacaacaaagaauacgaguacagcguggaaugccaagaggacagcgccuguccagccgccgaagagucucugccuaucgaagugaugguggacgccgugcacaagcugaaguacgagaacuacaccuccagcuuuuucauccgggacaucaucaagcccgauccuccaaagaaccugcagcugaagccucugaagaacagcagacagguggaaguguccugggaguaccccgacaccuggucuacaccccacagcuacuucagccugaccuuuugcgugcaagugcagggcaaguccaagcgcgagaaaaaggaccggguguucaccgacaagaccagcgccaccgugaucugcagaaagaacgccagcaucagcgucagagcccaggaccgguacuacagcagcucuuggagcgaaugggccagcgugccauguagc

SEQ ID NO: 63 - RNA, 921 nt, Artificial Sequence
  IL12B(23-328) CDS mRNA opt3v
aucugggagcugaagaaagacguguacgugguggaacuggacugguaucccgaugcuccuggcgagaugguggugcugaccugcgauaccccugaagaggacggcaucaccuggacacuggaucagucuagcgaggugcucggcagcggcaagacccugaccauccaagugaaagaguuuggcgacgccggccaguacaccugucacaaaggcggagaagugcugagccacagccugcugcugcuccacaagaaagaggauggcauuuggagcaccgacauccugaaggaccagaaagagcccaagaacaagaccuuccugagaugcgaggccaagaacuacagcggccgguucacauguugguggcugaccaccaucagcaccgaccugaccuucagcgugaaguccagcagaggcagcagugauccucagggcguuacauguggcgccgcuacacugucugccgaaagagugcggggcgacaacaaagaauacgaguacagcguggaaugccaagaggacagcgccuguccagccgccgaagagucucugccuaucgaagugaugguggacgccgugcacaagcugaaguacgagaacuacaccuccagcuuuuucauccgggacaucaucaagcccgauccuccaaagaaccugcagcugaagccucugaagaacagcagacagguggaaguguccugggaguaccccgacaccuggucuacaccccacagcuacuucagccugaccuuuugcgugcaagugcagggcaaguccaagcgcgagaaaaaggaccggguguucaccgacaagaccagcgccaccgugaucugcagaaagaacgccagcaucagcgucagagcccaggaccgguacuacagcagcucuuggagcgaaugggccagcgugccauguagcuaa

SEQ ID NO: 64 - RNA, 54 nt, Artificial Sequence
  Linker-sFvCC49-218 CDS mRNA opt3v
ggcucuacaucuggcucuggcaaaccuggaucuggcgagggcucuacaaagggc

SEQ ID NO: 65 - RNA, 1632 nt, Artificial Sequence
  IL12 CDS mRNA opt3v
augugucaccagcagcuggucaucagcugguucagccugguguuccuggccucuccucugguggccaucugggagcugaagaaagacguguacgugguggaacuggacugguaucccgaugcuccuggcgagaugguggugcugaccugcgauaccccugaagaggacggcaucaccuggacacuggaucagucuagcgaggugcucggcagcggcaagacccugaccauccaagugaaagaguuuggcgacgccggccaguacaccugucacaaaggcggagaagugcugagccacagccugcugcugcuccacaagaaagaggauggcauuuggagcaccgacauccugaaggaccagaaagagcccaagaacaagaccuuccugagaugcgaggccaagaacuacagcggccgguucacauguugguggcugaccaccaucagcaccgaccugaccuucagcgugaaguccagcagaggcagcagugauccucagggcguuacauguggcgccgcuacacugucugccgaaagagugcggggcgacaacaaagaauacgaguacagcguggaaugccaagaggacagcgccuguccagccgccgaagagucucugccuaucgaagugaugguggacgccgugcacaagcugaaguacgagaacuacaccuccagcuuuuucauccgggacaucaucaagcccgauccuccaaagaaccugcagcugaagccucugaagaacagcagacagguggaaguguccugggaguaccccgacaccuggucuacaccccacagcuacuucagccugaccuuuugcgugcaagugcagggcaaguccaagcgcgagaaaaaggaccggguguucaccgacaagaccagcgccaccgugaucugcagaaagaacgccagcaucagcgucagagcccaggaccgguacuacagcagcucuuggagcgaaugggccagcgugccauguagcggcucuacaucuggcucuggcaaaccuggaucuggcgagggcucuacaaagggcagaaaccugccaguggccacgccugauccuggcauguuuccuugucugcaccacagccagaaccugcugagagccguguccaacaugcugcagaaggccagacagacccucgaguucuaccccugcaccagcgaggaaaucgaccacgaggacaucaccaaggacaagaccagcaccguggaagccugccugccucuggaacugaccaagaacgagagcugccugaacagccgggaaaccagcuucaucaccaacggcucuugccuggccuccagaaagaccuccuucaugauggcccugugccugagcagcaucuacgaggaccugaagauguaccaggucgaguucaagaccaugaacgccaagcugcugauggaccccaagcggcagaucuuccuggaccagaauaugcuggccgugaucgacgagcugaugcaggcccugaacuucaacagcgagacagugccccagaaguccagccuggaagaacccgacuucuacaagaccaagaucaagcugugcauccugcugcacgccuuccggaucagagccgugaccaucgacagagugaugagcuaccugaacgccuccuga

SEQ ID NO: 66 - RNA, 786 nt, Artificial Sequence
  CD40LG CDS mRNA opt3v
augaucgagacauacaaccagacaagccccagaagcgccgccacaggacugccuaucagcaugaagaucuuuauguaccugcugaccguguuccugaucacccagaugaucggcagcgcccuguuugccguguaccugcacagacggcuggacaagaucgaggacgagagaaaccugcacgaggacuucguguucaugaagaccauccagcggugcaacaccggcgagagaagucugagccugcugaacugcgaggaaaucaagagccaguucgagggcuucgugaaggacaucaugcugaacaaagaggaaacgaagaaagaaaacuccuucgagaugcagaagggcgaccagaauccucagaucgccgcucacgugaucagcgaggccagcagcaagacaacaagcgugcugcagugggccgagaagggcuacuacaccaugagcaacaaccuggucacccuggaaaacggcaagcagcugacagugaagcggcagggccuguacuacaucuacgcccaagugaccuucugcagcaacagagaggccagcucucaggccccuuuuaucgccagccugugccugaaguccccuggcagauucgagcggauucugcugagagccgccaacacacacagcagcgccaaaccuuguggccagcagucuauucaccucggcggaguguuugagcugcagccuggcgcaagcguguucgugaaugugacagacccuagccaggugucccacggcaccggcuuuacaucuuucggacugcugaagcuguga

SEQ ID NO: 67 - RNA, 867 nt, Artificial Sequence
  PDCD1 CDS mRNA opt4
augcagaucccccaggcccccuggcccguggugugggccgugcugcagcugggcuggagacccggcugguuccuggacagccccgacagacccuggaacccccccaccuucagccccgcccugcugguggugaccgagggcgacaacgccaccuucaccuguagcuucagcaacaccagcgagagcuucgugcugaacugguacagaaugagccccagcaaccagaccgacaagcuggccgccuuccccgaggacagaagccagcccggccaggacugcagauucagagugacccagcugcccaacggcagagacuuccacaugagcguggugagagccagaagaaacgacagcggcaccuaccugugcggcgccaucagccuggcccccaaggcccagaucaaggagagccugagagccgagcugagagugaccgagagaagggccgaggugcccaccgcccaccccagccccagccccagacccgccggccaguuccagacccugguggugggcguggugggcggccugcugggcagccuggugcugcuggugugggugcuggccgugaucugcagcagagccgccagaggcaccaucggcgccagaagaaccggccagccccugaaggaggaccccagcgccgugcccguguucagcguggacuacggcgagcuggacuuccaguggagagagaagacccccgagccccccgugcccugcgugcccgagcagaccgaguacgccaccaucguguuccccagcggcaugggcaccagcagccccgccagaagaggcagcgccgacggccccagaagcgcccagccccugagacccgaggacggccacugcagcuggccccuguga

SEQ ID NO: 68 - RNA, 450 nt, Artificial Sequence
  PDCD1(1-149) CDS mRNA opt4
augcagaucccccaggcccccuggcccguggugugggccgugcugcagcugggcuggagacccggcugguuccuggacagccccgacagacccuggaacccccccaccuucagccccgcccugcugguggugaccgagggcgacaacgccaccuucaccuguagcuucagcaacaccagcgagagcuucgugcugaacugguacagaaugagccccagcaaccagaccgacaagcuggccgccuuccccgaggacagaagccagcccggccaggacugcagauucagagugacccagcugcccaacggcagagacuuccacaugagcguggugagagccagaagaaacgacagcggcaccuaccugugcggcgccaucagccuggcccccaaggcccagaucaaggagagccugagagccgagcugagagugaccgagagaagggccuga

SEQ ID NO: 69 - RNA, 660 nt, Artificial Sequence
  IL12A CDS mRNA opt4
augugccccgccagaagccugcugcugguggccacccuggugcugcuggaccaccugagccuggccagaaaccugcccguggccacccccgaccccggcauguuccccugccugcaccacagccagaaccugcugagagccgugagcaacaugcugcagaaggccagacagacccuggaguucuaccccugcaccagcgaggagaucgaccacgaggacaucaccaaggacaagaccagcaccguggaggccugccugccccuggagcugaccaagaacgagagcugccugaacagcagagagaccagcuucaucaccaacggcagcugccuggccagcagaaagaccagcuucaugauggcccugugccugagcagcaucuacgaggaccugaagauguaccagguggaguucaagaccaugaacgccaagcugcugauggaccccaagagacagaucuuccuggaccagaacaugcuggccgugaucgacgagcugaugcaggcccugaacuucaacagcgagaccgugccccagaagaguagccuggaggagcccgacuucuacaagaccaagaucaagcugugcauccugcugcacgccuucagaaucagagccgugaccaucgacagagugaugagcuaccugaacgccagcuga

SEQ ID NO: 70 - RNA, 657 nt, Artificial Sequence
  IL12A(1-219) CDS mRNA opt4
augugccccgccagaagccugcugcugguggccacccuggugcugcuggaccaccugagccuggccagaaaccugcccguggccacccccgaccccggcauguuccccugccugcaccacagccagaaccugcugagagccgugagcaacaugcugcagaaggccagacagacccuggaguucuaccccugcaccagcgaggagaucgaccacgaggacaucaccaaggacaagaccagcaccguggaggccugccugccccuggagcugaccaagaacgagagcugccugaacagcagagagaccagcuucaucaccaacggcagcugccuggccagcagaaagaccagcuucaugauggcccugugccugagcagcaucuacgaggaccugaagauguaccagguggaguucaagaccaugaacgccaagcugcugauggaccccaagagacagaucuuccuggaccagaacaugcuggccgugaucgacgagcugaugcaggcccugaacuucaacagcgagaccgugccccagaagaguagccuggaggagcccgacuucuacaagaccaagaucaagcugugcauccugcugcacgccuucagaaucagagccgugaccaucgacagagugaugagcuaccugaacgccagc

SEQ ID NO: 71 - RNA, 594 nt, Artificial Sequence
  IL12A(23-219) CDS mRNA opt4
agaaaccugcccguggccacccccgaccccggcauguuccccugccugcaccacagccagaaccugcugagagccgugagcaacaugcugcagaaggccagacagacccuggaguucuaccccugcaccagcgaggagaucgaccacgaggacaucaccaaggacaagaccagcaccguggaggccugccugccccuggagcugaccaagaacgagagcugccugaacagcagagagaccagcuucaucaccaacggcagcugccuggccagcagaaagaccagcuucaugauggcccugugccugagcagcaucuacgaggaccugaagauguaccagguggaguucaagaccaugaacgccaagcugcugauggaccccaagagacagaucuuccuggaccagaacaugcuggccgugaucgacgagcugaugcaggcccugaacuucaacagcgagaccgugccccagaagaguagccuggaggagcccgacuucuacaagaccaagaucaagcugugcauccugcugcacgccuucagaaucagagccgugaccaucgacagagugaugagcuaccugaacgccagcuga

SEQ ID NO: 72 - RNA, 987 nt, Artificial Sequence
  IL12B CDS mRNA opt4
augugccaccagcagcuggugaucagcugguucagccugguguuccuggccagcccccugguggccaucugggagcugaagaaggacguguacgugguggagcuggacugguaccccgacgcccccggcgagaugguggugcugaccugcgacacccccgaggaggacggcaucaccuggacccuggaccagagcagcgaggugcugggcagcggcaagacccugaccauccaggugaaggaguucggcgacgccggccaguacaccugucacaagggcggcgaggugcugagccacagccugcugcugcugcacaagaaggaggacggcaucuggagcaccgacauccugaaggaccagaaggagcccaagaacaagaccuuccugagaugcgaggccaagaacuacagcggcagauucaccuguugguggcugaccaccaucagcaccgaccugaccuucagcgugaagaguagcagaggcagcagcgacccccagggcgugaccugcggcgccgccacccugagcgccgagagagugagaggcgacaacaaggaguacgaguacagcguggagugccaggaggacagcgccugccccgccgccgaggagagccugcccaucgaggugaugguggacgccgugcacaagcugaaguacgagaacuacaccagcagcuucuucaucagagacaucaucaagcccgacccccccaagaaccugcagcugaagccccugaagaacagcagacagguggaggugagcugggaguaccccgacaccuggagcaccccccacagcuacuucagccugaccuucugcgugcagguucagggcaagagcaagagagagaagaaggacagaguguucaccgacaagaccagcgccaccgugaucugcagaaagaacgccagcaucagcgugagagcccaggacagauacuacagcagcagcuggagcgagugggccagcgugcccugcagcuga

SEQ ID NO: 73 - RNA, 984 nt, Artificial Sequence
  IL12B(1-328) CDS mRNA opt4
augugccaccagcagcuggugaucagcugguucagccugguguuccuggccagcccccugguggccaucugggagcugaagaaggacguguacgugguggagcuggacugguaccccgacgcccccggcgagaugguggugcugaccugcgacacccccgaggaggacggcaucaccuggacccuggaccagagcagcgaggugcugggcagcggcaagacccugaccauccaggugaaggaguucggcgacgccggccaguacaccugucacaagggcggcgaggugcugagccacagccugcugcugcugcacaagaaggaggacggcaucuggagcaccgacauccugaaggaccagaaggagcccaagaacaagaccuuccugagaugcgaggccaagaacuacagcggcagauucaccuguugguggcugaccaccaucagcaccgaccugaccuucagcgugaagaguagcagaggcagcagcgacccccagggcgugaccugcggcgccgccacccugagcgccgagagagugagaggcgacaacaaggaguacgaguacagcguggagugccaggaggacagcgccugccccgccgccgaggagagccugcccaucgaggugaugguggacgccgugcacaagcugaaguacgagaacuacaccagcagcuucuucaucagagacaucaucaagcccgacccccccaagaaccugcagcugaagccccugaagaacagcagacagguggaggugagcugggaguaccccgacaccuggagcaccccccacagcuacuucagccugaccuucugcgugcagguucagggcaagagcaagagagagaagaaggacagaguguucaccgacaagaccagcgccaccgugaucugcagaaagaacgccagcaucagcgugagagcccaggacagauacuacagcagcagcuggagcgagugggccagcgugcccugcagc

SEQ ID NO: 74 - RNA, 921 nt, Artificial Sequence
  IL12B(23-328) CDS mRNA opt4
aucugggagcugaagaaggacguguacgugguggagcuggacugguaccccgacgcccccggcgagaugguggugcugaccugcgacacccccgaggaggacggcaucaccuggacccuggaccagagcagcgaggugcugggcagcggcaagacccugaccauccaggugaaggaguucggcgacgccggccaguacaccugucacaagggcggcgaggugcugagccacagccugcugcugcugcacaagaaggaggacggcaucuggagcaccgacauccugaaggaccagaaggagcccaagaacaagaccuuccugagaugcgaggccaagaacuacagcggcagauucaccuguugguggcugaccaccaucagcaccgaccugaccuucagcgugaagaguagcagaggcagcagcgacccccagggcgugaccugcggcgccgccacccugagcgccgagagagugagaggcgacaacaaggaguacgaguacagcguggagugccaggaggacagcgccugccccgccgccgaggagagccugcccaucgaggugaugguggacgccgugcacaagcugaaguacgagaacuacaccagcagcuucuucaucagagacaucaucaagcccgacccccccaagaaccugcagcugaagccccugaagaacagcagacagguggaggugagcugggaguaccccgacaccuggagcaccccccacagcuacuucagccugaccuucugcgugcagguucagggcaagagcaagagagagaagaaggacagaguguucaccgacaagaccagcgccaccgugaucugcagaaagaacgccagcaucagcgugagagcccaggacagauacuacagcagcagcuggagcgagugggccagcgugcccugcagcuga

SEQ ID NO: 75 - RNA, 54 nt, Artificial Sequence
  Linker-sFvCC49-218 CDS mRNA opt4
ggcagcaccagcggcagcggcaagcccggcagcggcgagggcagcaccaagggc

SEQ ID NO: 76 - RNA, 1632 nt, Artificial Sequence
  IL12 CDS mRNA opt4
augugccaccagcagcuggugaucagcugguucagccugguguuccuggccagcccccugguggccaucugggagcugaagaaggacguguacgugguggagcuggacugguaccccgacgcccccggcgagaugguggugcugaccugcgacacccccgaggaggacggcaucaccuggacccuggaccagagcagcgaggugcugggcagcggcaagacccugaccauccaggugaaggaguucggcgacgccggccaguacaccugucacaagggcggcgaggugcugagccacagccugcugcugcugcacaagaaggaggacggcaucuggagcaccgacauccugaaggaccagaaggagcccaagaacaagaccuuccugagaugcgaggccaagaacuacagcggcagauucaccuguugguggcugaccaccaucagcaccgaccugaccuucagcgugaagaguagcagaggcagcagcgacccccagggcgugaccugcggcgccgccacccugagcgccgagagagugagaggcgacaacaaggaguacgaguacagcguggagugccaggaggacagcgccugccccgccgccgaggagagccugcccaucgaggugaugguggacgccgugcacaagcugaaguacgagaacuacaccagcagcuucuucaucagagacaucaucaagcccgacccccccaagaaccugcagcugaagccccugaagaacagcagacagguggaggugagcugggaguaccccgacaccuggagcaccccccacagcuacuucagccugaccuucugcgugcagguucagggcaagagcaagagagagaagaaggacagaguguucaccgacaagaccagcgccaccgugaucugcagaaagaacgccagcaucagcgugagagcccaggacagauacuacagcagcagcuggagcgagugggccagcgugcccugcagcggcagcaccagcggcagcggcaagcccggcagcggcgagggcagcaccaagggcagaaaccugcccguggccacccccgaccccggcauguuccccugccugcaccacagccagaaccugcugagagccgugagcaacaugcugcagaaggccagacagacccuggaguucuaccccugcaccagcgaggagaucgaccacgaggacaucaccaaggacaagaccagcaccguggaggccugccugccccuggagcugaccaagaacgagagcugccugaacagcagagagaccagcuucaucaccaacggcagcugccuggccagcagaaagaccagcuucaugauggcccugugccugagcagcaucuacgaggaccugaagauguaccagguggaguucaagaccaugaacgccaagcugcugauggaccccaagagacagaucuuccuggaccagaacaugcuggccgugaucgacgagcugaugcaggcccugaacuucaacagcgagaccgugccccagaagaguagccuggaggagcccgacuucuacaagaccaagaucaagcugugcauccugcugcacgccuucagaaucagagccgugaccaucgacagagugaugagcuaccugaacgccagcuga

SEQ ID NO: 77 - RNA, 786 nt, Artificial Sequence
  CD40LG CDS mRNA opt4
augaucgagaccuacaaccagaccagccccagaagcgccgccaccggccugcccaucagcaugaagaucuucauguaccugcugaccguguuccugaucacccagaugaucggcagcgcccuguucgccguguaccugcacagaagacuggacaagaucgaggacgagagaaaccugcacgaggacuucguguucaugaagaccauccagagaugcaacaccggcgagagaagccugagccugcugaacugcgaggagaucaagagccaguucgagggcuucgugaaggacaucaugcugaacaaggaggagaccaagaaggagaacagcuucgagaugcagaagggcgaccagaacccccagaucgccgcccacgugaucagcgaggccagcagcaagaccaccagcgugcugcagugggccgagaagggcuacuacaccaugagcaacaaccuggugacccuggagaacggcaagcagcugaccgugaagagacagggccuguacuacaucuacgcccaggugaccuucugcagcaacagagaggccagcagccaggcccccuucaucgccagccugugccugaagagucccggcagauucgagagaauccugcugagagccgccaacacccacagcagcgccaagcccugcggccagcagagcauccaccugggcggcguguucgagcugcagcccggcgccagcguguucgugaacgugaccgaccccagccaggugagccacggcaccggcuucaccagcuucggccugcugaagcuguga

SEQ ID NO: 78 - RNA, 867 nt, Artificial Sequence
  PDCD1 CDS mRNA opt5
augcagaucccccaagccccuuggccgguggucugggcuguucugcagcucggcuggagacccgggugguuccuggacagcccugaucggcccuggaacccucccaccuuuuccccugcccuucugguggugacagagggagacaaugcgacguuuaccugcucuuucagcaacacauccgaaucuuucguccucaauugguaccgcaugagcccguccaaccagaccgauaagcuggcugccuuucccgaggacagaucucagccuggccaagauugucgguuccgcgugacacagcuucccaaugggagagacuuucacaugagcguugugcgggcccgcagaaacgauuccggaaccuaucugugcggcgcuauuagccucgccccuaaagcucagaucaaggaaucucugcgggccgagcugcgcgucacagaaagacgggcggaggugcccaccgcccauccguccccuagcccccgcccugcugggcaguuccaaacgcucguugugggagucgugggcggccugcuugggucucuggugcuccuggucuggguucuugccgugauuuguuccagagcugcccggggaaccaucggcgcgcgcagaacagggcagccccugaaagaggaccccagcgccgugccugucuuuucuguggauuacggagaacucgacuuccaguggcgggagaagaccccggaacccccuguucccugcgugccugagcagacagaguaugcuaccauugucuuucccuccggcauggggacgagcuccccggccagacgcggaucugcugauggcccucggagcgcccaaccccugagaccugaagacggccacuguuccuggccccuguga

SEQ ID NO: 79 - RNA, 450 nt, Artificial Sequence
  PDCD1(1-149) CDS mRNA opt5
augcagaucccccaagccccuuggccgguggucugggcuguucugcagcucggcuggagacccgggugguuccuggacagcccugaucggcccuggaacccucccaccuuuuccccugcccuucugguggugacagagggagacaaugcgacguuuaccugcucuuucagcaacacauccgaaucuuucguccucaauugguaccgcaugagcccguccaaccagaccgauaagcuggcugccuuucccgaggacagaucucagccuggccaagauugucgguuccgcgugacacagcuucccaaugggagagacuuucacaugagcguugugcgggcccgcagaaacgauuccggaaccuaucugugcggcgcuauuagccucgccccuaaagcucagaucaaggaaucucugcgggccgagcugcgcgucacagaaagacgggcguga

SEQ ID NO: 80 - RNA, 660 nt, Artificial Sequence
  IL12A CDS mRNA opt5
augugccccgccagaagccugcuccugguggcuacccuuguccugcucgaccaccugucccuugcccggaaccugccuguugcgacaccggaucccggcauguucccuugucuccaucacucucagaaucugcugcgcgcugugagcaacaugcuccaaaaggccagacagacgcuggaguuuuaccccugcaccuccgaagagaucgaccaugaagauauuacaaaagacaagaccucuacaguggaggccugucuuccucuggaacucaccaaaaaugagagcugccugaacucccgggagacaucuuucaucaccaaugggagcugucuugcuucccgcaagacgagcuuuaugauggcccugugccucucuuccauuuaugaagaucugaaaauguaccaggucgaguucaagaccaugaacgcuaagcugcucauggaccccaaaagacagaucuuucuggaucaaaauaugcuugccgugauugacgaacugaugcaggcgcucaacuucaauagcgagacaguuccucagaagucuucccuggaggaaccggauuuuuauaaaaccaagaucaaacuuuguauccugcuccacgccuuccggauucgcgcugugacaaucgacagagucaugagcuaccugaacgccucuuga

SEQ ID NO: 81 - RNA, 657 nt, Artificial Sequence
  IL12A(1-219) CDS mRNA opt5
augugccccgccagaagccugcuccugguggcuacccuuguccugcucgaccaccugucccuugcccggaaccugccuguugcgacaccggaucccggcauguucccuugucuccaucacucucagaaucugcugcgcgcugugagcaacaugcuccaaaaggccagacagacgcuggaguuuuaccccugcaccuccgaagagaucgaccaugaagauauuacaaaagacaagaccucuacaguggaggccugucuuccucuggaacucaccaaaaaugagagcugccugaacucccgggagacaucuuucaucaccaaugggagcugucuugcuucccgcaagacgagcuuuaugauggcccugugccucucuuccauuuaugaagaucugaaaauguaccaggucgaguucaagaccaugaacgcuaagcugcucauggaccccaaaagacagaucuuucuggaucaaaauaugcuugccgugauugacgaacugaugcaggcgcucaacuucaauagcgagacaguuccucagaagucuucccuggaggaaccggauuuuuauaaaaccaagaucaaacuuuguauccugcuccacgccuuccggauucgcgcugugacaaucgacagagucaugagcuaccugaacgccucu

SEQ ID NO: 82 - RNA, 594 nt, Artificial Sequence
  IL12A(23-219) CDS mRNA opt5
cggaaccugccuguugcgacaccggaucccggcauguucccuugucuccaucacucucagaaucugcugcgcgcugugagcaacaugcuccaaaaggccagacagacgcuggaguuuuaccccugcaccuccgaagagaucgaccaugaagauauuacaaaagacaagaccucuacaguggaggccugucuuccucuggaacucaccaaaaaugagagcugccugaacucccgggagacaucuuucaucaccaaugggagcugucuugcuucccgcaagacgagcuuuaugauggcccugugccucucuuccauuuaugaagaucugaaaauguaccaggucgaguucaagaccaugaacgcuaagcugcucauggaccccaaaagacagaucuuucuggaucaaaauaugcuugccgugauugacgaacugaugcaggcgcucaacuucaauagcgagacaguuccucagaagucuucccuggaggaaccggauuuuuauaaaaccaagaucaaacuuuguauccugcuccacgccuuccggauucgcgcugugacaaucgacagagucaugagcuaccugaacgccucuuga

SEQ ID NO: 83 - RNA, 987 nt, Artificial Sequence
  IL12B CDS mRNA opt5
augugccaccagcaacuggugaucagcugguucucccucgucuuucuggccucuccccuuguugcuauuugggagcugaagaaagacguguacguggucgaacucgauugguauccugacgccccgggcgagauggugguucugaccugugauacacccgaagaggacgggaucacguggacccuugaucagagcuccgaagugcugggaucuggcaagacacucaccauucaggucaaagaguucggggacgcgggacaguacacaugccauaagggcggggaggugcugagccacucccugcuccugcuucauaaaaaggaagauggaaucuggucuaccgacauucugaaggaucaaaaagagccuaagaacaaaacauuucucagaugugaagcuaagaauuauagcggccgguuuaccugcugguggcugacgaccaucuccacagaccuuaccuucagcguuaaaucuucccgcggcagcucugauccccagggggugacauguggagccgccacccuguccgcugagagaguccggggcgacaacaaggaguacgaauauagcguggagugccaggaagauucugccuguccugcugccgaggaaucccuccccaucgaggugauggucgacgcgguucacaagcugaaauacgagaauuauacgagcuccuucuuuauucgcgacaucauuaagccugauccgcccaaaaaccugcagcucaagccucugaaaaauucuagacaaguggaagugagcugggaguaccccgacacaugguccaccccucauagcuacuucucucuuacauuuugcguccaggugcaggggaaguccaaacgggaaaagaaggaucgcguuuucaccgacaaaaccagcgccacagugaucuguagaaagaacgcuucuauuagcguccgggcccaggaucgcuauuacuccucuagcugguccgagugggcuagcgugcccugcucuuga

SEQ ID NO: 84 - RNA, 984 nt, Artificial Sequence
  IL12B(1-328) CDS mRNA opt5
augugccaccagcaacuggugaucagcugguucucccucgucuuucuggccucuccccuuguugcuauuugggagcugaagaaagacguguacguggucgaacucgauugguauccugacgccccgggcgagauggugguucugaccugugauacacccgaagaggacgggaucacguggacccuugaucagagcuccgaagugcugggaucuggcaagacacucaccauucaggucaaagaguucggggacgcgggacaguacacaugccauaagggcggggaggugcugagccacucccugcuccugcuucauaaaaaggaagauggaaucuggucuaccgacauucugaaggaucaaaaagagccuaagaacaaaacauuucucagaugugaagcuaagaauuauagcggccgguuuaccugcugguggcugacgaccaucuccacagaccuuaccuucagcguuaaaucuucccgcggcagcucugauccccagggggugacauguggagccgccacccuguccgcugagagaguccggggcgacaacaaggaguacgaauauagcguggagugccaggaagauucugccuguccugcugccgaggaaucccuccccaucgaggugauggucgacgcgguucacaagcugaaauacgagaauuauacgagcuccuucuuuauucgcgacaucauuaagccugauccgcccaaaaaccugcagcucaagccucugaaaaauucuagacaaguggaagugagcugggaguaccccgacacaugguccaccccucauagcuacuucucucuuacauuuugcguccaggugcaggggaaguccaaacgggaaaagaaggaucgcguuuucaccgacaaaaccagcgccacagugaucuguagaaagaacgcuucuauuagcguccgggcccaggaucgcuauuacuccucuagcugguccgagugggcuagcgugcccugcucu

SEQ ID NO: 85 - RNA, 921 nt, Artificial Sequence
  IL12B(23-328) CDS mRNA opt5
auuugggagcugaagaaagacguguacguggucgaacucgauugguauccugacgccccgggcgagauggugguucugaccugugauacacccgaagaggacgggaucacguggacccuugaucagagcuccgaagugcugggaucuggcaagacacucaccauucaggucaaagaguucggggacgcgggacaguacacaugccauaagggcggggaggugcugagccacucccugcuccugcuucauaaaaaggaagauggaaucuggucuaccgacauucugaaggaucaaaaagagccuaagaacaaaacauuucucagaugugaagcuaagaauuauagcggccgguuuaccugcugguggcugacgaccaucuccacagaccuuaccuucagcguuaaaucuucccgcggcagcucugauccccagggggugacauguggagccgccacccuguccgcugagagaguccggggcgacaacaaggaguacgaauauagcguggagugccaggaagauucugccuguccugcugccgaggaaucccuccccaucgaggugauggucgacgcgguucacaagcugaaauacgagaauuauacgagcuccuucuuuauucgcgacaucauuaagccugauccgcccaaaaaccugcagcucaagccucugaaaaauucuagacaaguggaagugagcugggaguaccccgacacaugguccaccccucauagcuacuucucucuuacauuuugcguccaggugcaggggaaguccaaacgggaaaagaaggaucgcguuuucaccgacaaaaccagcgccacagugaucuguagaaagaacgcuucuauuagcguccgggcccaggaucgcuauuacuccucuagcugguccgagugggcuagcgugcccugcucuuga

SEQ ID NO: 86 - RNA, 54 nt, Artificial Sequence
  Linker-sFvCC49-218 CDS mRNA opt5
ggcagcaccuccgggucuggaaagcccggcagcggggagggauccacaaaaggc

SEQ ID NO: 87 - RNA, 1632 nt, Artificial Sequence
  IL12 CDS mRNA opt5
augugccaccagcaacuggugaucagcugguucucccucgucuuucuggccucuccccuuguugcuauuugggagcugaagaaagacguguacguggucgaacucgauugguauccugacgccccgggcgagauggugguucugaccugugauacacccgaagaggacgggaucacguggacccuugaucagagcuccgaagugcugggaucuggcaagacacucaccauucaggucaaagaguucggggacgcgggacaguacacaugccauaagggcggggaggugcugagccacucccugcuccugcuucauaaaaaggaagauggaaucuggucuaccgacauucugaaggaucaaaaagagccuaagaacaaaacauuucucagaugugaagcuaagaauuauagcggccgguuuaccugcugguggcugacgaccaucuccacagaccuuaccuucagcguuaaaucuucccgcggcagcucugauccccagggggugacauguggagccgccacccuguccgcugagagaguccggggcgacaacaaggaguacgaauauagcguggagugccaggaagauucugccuguccugcugccgaggaaucccuccccaucgaggugauggucgacgcgguucacaagcugaaauacgagaauuauacgagcuccuucuuuauucgcgacaucauuaagccugauccgcccaaaaaccugcagcucaagccucugaaaaauucuagacaaguggaagugagcugggaguaccccgacacaugguccaccccucauagcuacuucucucuuacauuuugcguccaggugcaggggaaguccaaacgggaaaagaaggaucgcguuuucaccgacaaaaccagcgccacagugaucuguagaaagaacgcuucuauuagcguccgggcccaggaucgcuauuacuccucuagcugguccgagugggcuagcgugcccugcucuggcagcaccuccgggucuggaaagcccggcagcggggagggauccacaaaaggccggaaccugccuguugcgacaccggaucccggcauguucccuugucuccaucacucucagaaucugcugcgcgcugugagcaacaugcuccaaaaggccagacagacgcuggaguuuuaccccugcaccuccgaagagaucgaccaugaagauauuacaaaagacaagaccucuacaguggaggccugucuuccucuggaacucaccaaaaaugagagcugccugaacucccgggagacaucuuucaucaccaaugggagcugucuugcuucccgcaagacgagcuuuaugauggcccugugccucucuuccauuuaugaagaucugaaaauguaccaggucgaguucaagaccaugaacgcuaagcugcucauggaccccaaaagacagaucuuucuggaucaaaauaugcuugccgugauugacgaacugaugcaggcgcucaacuucaauagcgagacaguuccucagaagucuucccuggaggaaccggauuuuuauaaaaccaagaucaaacuuuguauccugcuccacgccuuccggauucgcgcugugacaaucgacagagucaugagcuaccugaacgccucuuga

SEQ ID NO: 88 - RNA, 786 nt, Artificial Sequence
  CD40LG CDS mRNA opt5
augaucgagaccuacaaccagacaagccccagauccgccgcuacgggccugccuauuucuaugaagaucuucauguaucuccugaccguguuucuuauuacacaaaugaucgggagcgcccuguucgcggucuaccuccaccggcgccuggacaaaauugaagaugagagaaaucuucaugaagacuuuguuuucaugaagaccauccagcggugcaacacaggagagcgcucccugucucuccugaauugugaagagaucaaaagccaguuugagggcuucgugaaggauauuaugcugaacaaagaagagaccaagaaggaaaauuccuuugagaugcagaaaggggaccaaaacccgcagaucgcugcccacgugauuucugaggccagcuccaagacaaccagcguccuccagugggcugaaaaaggauauuacacgaugucuaauaaccuggugacccuugagaauggcaagcagcugacaguuaaaagacaagggcucuauuacaucuaugcccaggugaccuucugcuccaaccgggaagcuagcucucaggcccccuuuauugcgucccugugucuuaagagcccuggacgcuucgagagaauccugcuccgggccgcuaauacacauucuuccgccaagcccugcggccagcaaagcauucaccugggcggggucuuugaacugcagccuggagcuuccguguucguuaacgugaccgaucccucucaggucagccauggcacgggguuuacauccuucggacuccugaaacuuuga

SEQ ID NO: 89 - RNA, 867 nt, Artificial Sequence
  PDCD1 CDS mRNA opt6
augcaaauaccacaagcaccauggccaguaguaugggcuguacuacaauuagguuggcgaccaggaugguuuuuagacucaccagaucguccauggaacccaccaacauuuucaccagcauuauuaguaguaacagaaggagauaaugcaaccuuuacauguucauucaguaacacaucagaaaguuuuguacuaaauugguauagaaugucaccuucaaaucaaacagauaaauuagcagcauuuccagaagauagaucacaaccaggacaagauugcagauuuagaguaacacaauuaccuaauggacgagacuuucauaugucaguaguaagagcucgacguaacgauucaggaacauacuuauguggagcaauaucauuagcaccaaaagcacaaauaaaagaaucuuuaagagcagaauuaagaguaacagaaagacgcgcagaaguaccaacagcacauccaagcccuucaccacgaccugcaggacaauuucaaacauuaguagucggaguaguaggaggauuauuagguucacugguauuauuaguauggguauuagcaguaauaugcuccagagcagcaagaggaacaauaggagcaagaagaacaggacaaccauuaaaagaagacccaucugcaguaccaguauuuucaguugacuauggagaacuagauuuccaauggagggaaaaaacaccagaaccuccaguuccauguguaccagaacaaacagaauaugcaacaauuguauuucccucaggaaugggaacaucuaguccagcaagaagaggaucagcugauggaccaagaucagcacaaccauuaagaccagaagauggacauuguucauggccauuauaa

SEQ ID NO: 90 - RNA, 450 nt, Artificial Sequence
  PDCD1(1-149) CDS mRNA opt6
augcaaauaccacaagcaccauggccaguaguaugggcuguacuacaauuagguuggcgaccaggaugguuuuuagacucaccagaucguccauggaacccaccaacauuuucaccagcauuauuaguaguaacagaaggagauaaugcaaccuuuacauguucauucaguaacacaucagaaaguuuuguacuaaauugguauagaaugucaccuucaaaucaaacagauaaauuagcagcauuuccagaagauagaucacaaccaggacaagauugcagauuuagaguaacacaauuaccuaauggacgagacuuucauaugucaguaguaagagcucgacguaacgauucaggaacauacuuauguggagcaauaucauuagcaccaaaagcacaaauaaaagaaucuuuaagagcagaauuaagaguaacagaaagacgcgcauaa

SEQ ID NO: 91 - RNA, 660 nt, Artificial Sequence
  IL12A CDS mRNA opt6
augugcccagcaagaucacuacuacugguagcaacacugguacuacuagaccaccuaucacucgccagaaaccucccaguagccacaccagacccaggaauguuccccugccuccaccauucccaaaaccuacuaagagcaguaucaaacaugcuacaaaaagcaagacaaacacuagaguucuauccaugcacaucagaagaaauagaccacgaagacauaacaaaagacaaaacaucaaccguagaagcaugccucccacucgaacucacaaaaaacgaaucaugccuaaacucaagagaaacaucauucauaacaaacggcucaugcuuagccucaagaaaaacaucauucaugauggcacuaugccucucauccauauaugaagacuuaaaaauguaccaaguagaauuuaaaaccaugaacgcaaaauuacuaauggacccaaaaagacaaauauuccuagaccaaaacaugcuagcaguaauagacgaacuaaugcaagcacuaaacuucaacucagaaaccguaccccaaaaaucaucucuagaagaaccagacuucuacaaaacaaaaauaaaacuaugcauacuacuacacgccuucagaauaagagccgucacaauagacagagucaugucauaccuaaacgccucauaa

SEQ ID NO: 92 - RNA, 657 nt, Artificial Sequence
  IL12A(1-219) CDS mRNA opt6
augugcccagcaagaucacuacuacugguagcaacacugguacuacuagaccaccuaucacucgccagaaaccucccaguagccacaccagacccaggaauguuccccugccuccaccauucccaaaaccuacuaagagcaguaucaaacaugcuacaaaaagcaagacaaacacuagaguucuauccaugcacaucagaagaaauagaccacgaagacauaacaaaagacaaaacaucaaccguagaagcaugccucccacucgaacucacaaaaaacgaaucaugccuaaacucaagagaaacaucauucauaacaaacggcucaugcuuagccucaagaaaaacaucauucaugauggcacuaugccucucauccauauaugaagacuuaaaaauguaccaaguagaauuuaaaaccaugaacgcaaaauuacuaauggacccaaaaagacaaauauuccuagaccaaaacaugcuagcaguaauagacgaacuaaugcaagcacuaaacuucaacucagaaaccguaccccaaaaaucaucucuagaagaaccagacuucuacaaaacaaaaauaaaacuaugcauacuacuacacgccuucagaauaagagccgucacaauagacagagucaugucauaccuaaacgccuca

SEQ ID NO: 93 - RNA, 594 nt, Artificial Sequence
  IL12A(23-219) CDS mRNA opt6
agaaaccucccaguagccacaccagacccaggaauguuccccugccuccaccauucccaaaaccuacuaagagcaguaucaaacaugcuacaaaaagcaagacaaacacuagaguucuauccaugcacaucagaagaaauagaccacgaagacauaacaaaagacaaaacaucaaccguagaagcaugccucccacucgaacucacaaaaaacgaaucaugccuaaacucaagagaaacaucauucauaacaaacggcucaugcuuagccucaagaaaaacaucauucaugauggcacuaugccucucauccauauaugaagacuuaaaaauguaccaaguagaauuuaaaaccaugaacgcaaaauuacuaauggacccaaaaagacaaauauuccuagaccaaaacaugcuagcaguaauagacgaacuaaugcaagcacuaaacuucaacucagaaaccguaccccaaaaaucaucucuagaagaaccagacuucuacaaaacaaaaauaaaacuaugcauacuacuacacgccuucagaauaagagccgucacaauagacagagucaugucauaccuaaacgccucauaa

SEQ ID NO: 94 - RNA, 987 nt, Artificial Sequence
  IL12B CDS mRNA opt6
augugccaccaacaacugguaauaucaugguucucacugguauucuuggcaucaccccuaguagcaauaugggaacuaaaaaaagacguauacguaguagaacuagacugguacccagacgcaccaggagaaaugguaguauuaacaugcgacacaccagaagaagauggaauaacuuggacauuagaccaaucaagugaaguauuaggaucaggcaaaacacuaacuauacaaguaaaagaauuuggagacgcaggacaauacacgugccacaaaggaggcgaaguccuaucacauucacuacuauuauuacacaaaaaagaagacggaaucuggagcacagacauauuaaaagaccaaaaagaaccaaaaaacaaaacauuucuaagaugcgaagcuaaaaacuauucaggaagauucacaugcugguggcuaacaaccaucaguaccgacuuaacauucucaguaaaaucaucaagaggaucaucagacccacaaggaguaacauguggagcagcaacacuaagcgcagaaagaguacgaggagacaacaaagaauacgaauauucaguagaaugucaagaagacucagcaugcccugcagcagaagaaucauuaccaauagaaguaauggucgacgcuguacacaaacuaaaauaugaaaauuacacaagcaguuucuucauaagagacauaauaaaacccgacccaccaaaaaaccuacaacuaaaaccauuaaaaaauucaagacaaguagaaguaucaugggaauacccagauacauggagcacaccacacaguuacuucucauuaacauucugcguacaaguacaaggaaaaaguaaaagagaaaaaaaagacagaguauucacagauaagacuucagcaacaguaauaugcagaaaaaacgcaagcauaagcguacgagcacaagacagauauuacucaagcucauggucagaaugggcaucaguaccauguucauaa

SEQ ID NO: 95 - RNA, 984 nt, Artificial Sequence
  IL12B(1-328) CDS mRNA opt6
augugccaccaacaacugguaauaucaugguucucacugguauucuuggcaucaccccuaguagcaauaugggaacuaaaaaaagacguauacguaguagaacuagacugguacccagacgcaccaggagaaaugguaguauuaacaugcgacacaccagaagaagauggaauaacuuggacauuagaccaaucaagugaaguauuaggaucaggcaaaacacuaacuauacaaguaaaagaauuuggagacgcaggacaauacacgugccacaaaggaggcgaaguccuaucacauucacuacuauuauuacacaaaaaagaagacggaaucuggagcacagacauauuaaaagaccaaaaagaaccaaaaaacaaaacauuucuaagaugcgaagcuaaaaacuauucaggaagauucacaugcugguggcuaacaaccaucaguaccgacuuaacauucucaguaaaaucaucaagaggaucaucagacccacaaggaguaacauguggagcagcaacacuaagcgcagaaagaguacgaggagacaacaaagaauacgaauauucaguagaaugucaagaagacucagcaugcccugcagcagaagaaucauuaccaauagaaguaauggucgacgcuguacacaaacuaaaauaugaaaauuacacaagcaguuucuucauaagagacauaauaaaacccgacccaccaaaaaaccuacaacuaaaaccauuaaaaaauucaagacaaguagaaguaucaugggaauacccagauacauggagcacaccacacaguuacuucucauuaacauucugcguacaaguacaaggaaaaaguaaaagagaaaaaaaagacagaguauucacagauaagacuucagcaacaguaauaugcagaaaaaacgcaagcauaagcguacgagcacaagacagauauuacucaagcucauggucagaaugggcaucaguaccauguuca

SEQ ID NO: 96 - RNA, 921 nt, Artificial Sequence
  IL12B(23-328) CDS mRNA opt6
auaugggaacuaaaaaaagacguauacguaguagaacuagacugguacccagacgcaccaggagaaaugguaguauuaacaugcgacacaccagaagaagauggaauaacuuggacauuagaccaaucaagugaaguauuaggaucaggcaaaacacuaacuauacaaguaaaagaauuuggagacgcaggacaauacacgugccacaaaggaggcgaaguccuaucacauucacuacuauuauuacacaaaaaagaagacggaaucuggagcacagacauauuaaaagaccaaaaagaaccaaaaaacaaaacauuucuaagaugcgaagcuaaaaacuauucaggaagauucacaugcugguggcuaacaaccaucaguaccgacuuaacauucucaguaaaaucaucaagaggaucaucagacccacaaggaguaacauguggagcagcaacacuaagcgcagaaagaguacgaggagacaacaaagaauacgaauauucaguagaaugucaagaagacucagcaugcccugcagcagaagaaucauuaccaauagaaguaauggucgacgcuguacacaaacuaaaauaugaaaauuacacaagcaguuucuucauaagagacauaauaaaacccgacccaccaaaaaaccuacaacuaaaaccauuaaaaaauucaagacaaguagaaguaucaugggaauacccagauacauggagcacaccacacaguuacuucucauuaacauucugcguacaaguacaaggaaaaaguaaaagagaaaaaaaagacagaguauucacagauaagacuucagcaacaguaauaugcagaaaaaacgcaagcauaagcguacgagcacaagacagauauuacucaagcucauggucagaaugggcaucaguaccauguucauaa

SEQ ID NO: 97 - RNA, 54 nt, Artificial Sequence
  Linker-sFvCC49-218 CDS mRNA opt6
ggaaguacaaguggaaguggaaaaccaggaaguggagaaggaaguacaaaagga

SEQ ID NO: 98 - RNA, 1632 nt, Artificial Sequence
  IL12 CDS mRNA opt6
augugccaccaacaacugguaauaucaugguucucacugguauucuuggcaucaccccuaguagcaauaugggaacuaaaaaaagacguauacguaguagaacuagacugguacccagacgcaccaggagaaaugguaguauuaacaugcgacacaccagaagaagauggaauaacuuggacauuagaccaaucaagugaaguauuaggaucaggcaaaacacuaacuauacaaguaaaagaauuuggagacgcaggacaauacacgugccacaaaggaggcgaaguccuaucacauucacuacuauuauuacacaaaaaagaagacggaaucuggagcacagacauauuaaaagaccaaaaagaaccaaaaaacaaaacauuucuaagaugcgaagcuaaaaacuauucaggaagauucacaugcugguggcuaacaaccaucaguaccgacuuaacauucucaguaaaaucaucaagaggaucaucagacccacaaggaguaacauguggagcagcaacacuaagcgcagaaagaguacgaggagacaacaaagaauacgaauauucaguagaaugucaagaagacucagcaugcccugcagcagaagaaucauuaccaauagaaguaauggucgacgcuguacacaaacuaaaauaugaaaauuacacaagcaguuucuucauaagagacauaauaaaacccgacccaccaaaaaaccuacaacuaaaaccauuaaaaaauucaagacaaguagaaguaucaugggaauacccagauacauggagcacaccacacaguuacuucucauuaacauucugcguacaaguacaaggaaaaaguaaaagagaaaaaaaagacagaguauucacagauaagacuucagcaacaguaauaugcagaaaaaacgcaagcauaagcguacgagcacaagacagauauuacucaagcucauggucagaaugggcaucaguaccauguucaggaaguacaaguggaaguggaaaaccaggaaguggagaaggaaguacaaaaggaagaaaccucccaguagccacaccagacccaggaauguuccccugccuccaccauucccaaaaccuacuaagagcaguaucaaacaugcuacaaaaagcaagacaaacacuagaguucuauccaugcacaucagaagaaauagaccacgaagacauaacaaaagacaaaacaucaaccguagaagcaugccucccacucgaacucacaaaaaacgaaucaugccuaaacucaagagaaacaucauucauaacaaacggcucaugcuuagccucaagaaaaacaucauucaugauggcacuaugccucucauccauauaugaagacuuaaaaauguaccaaguagaauuuaaaaccaugaacgcaaaauuacuaauggacccaaaaagacaaauauuccuagaccaaaacaugcuagcaguaauagacgaacuaaugcaagcacuaaacuucaacucagaaaccguaccccaaaaaucaucucuagaagaaccagacuucuacaaaacaaaaauaaaacuaugcauacuacuacacgccuucagaauaagagccgucacaauagacagagucaugucauaccuaaacgccucauaa

SEQ ID NO: 99 - RNA, 786 nt, Artificial Sequence
  CD40LG CDS mRNA opt6
augauagaaacauauaaucaaacaagcccaagaucagcagcaacaggacuaccaauaucaaugaaaauauucauguaccuacucacagucuuccuaauaacacaaaugauaggaucugcccuauuugcaguauaccuacacagaagacuagauaaaauagaagacgaaagaaaccuacaugaagacuucguauucaugaaaacaauacaaagaugcaacaccggagaaagaucccuaucacuacuaaacugcgaagaaauaaaaucacaauucgaaggauucguaaaagacauaaugcuaaacaaagaagaaacaaaaaaagaaaacucuuucgaaaugcaaaaaggagaccaaaacccacaaauagcugcacacgucauaucagaagcaucaucaaaaacaacaucaguacuucaaugggcagaaaaaggauacuauacaaugucaaacaaucuaguaacccuagaaaacggaaaacaacuaacaguaaaaagacaaggacuauacuauauauacgcacaaguaacauucugcucaaacagagaagcaucaucacaagcaccauucaucgcaucacuaugccuaaaauccccaggaagauucgaacgaauccuacuaagagcagcaaacacacacucaucagcaaaaccaugcggccaacaaucaauacaccuaggaggaguauucgaacuacaaccaggagcaucaguauucguaaacguaacagaccccucacaaguaagccacggcacaggauucacaucauuuggacuauuaaaauuauaa

SEQ ID NO: 100 - RNA, 867 nt, Artificial Sequence
  PDCD1 CDS mRNA opt7
augcagaucccccaagccccauggccgguggucugggcagugcugcagcucggcuggaggcccgggugguuccuggacagcccagaucggcccuggaacccacccaccuuuuccccagccuugcugguagugacugagggugacaaugcgaccuucacgugcaguuuuagcaacacuuccgaaaguuucguccucaauugguaccgcaugagcccguccaaccagaccgauaagcuggccgcauuucccgaggacaggagccagccaggccaagauugucgguuccgcgugacccaguugcccaaugggagggacuuucacauguccgugguccgggcccgcaggaacgauaguggcacuuaucugugcggugcaauuagccucgccccaaaagcgcagaucaaggaaucccugcgggccgagcugcgcgugaccgaaaggcgggcagagguacccacggcccauccgagccccaguccacgccccgccgggcaguuccaaacucucguggucggcguggugggcgggcuguuggguucccugguccuccugguguggguacuggcagugauuuguagcagggccgcgcggggcaccaucggggcccgcaggacuggccagccauugaaagaggaccccuccgcagucccaguguuuaguguggauuacggugaacucgacuuccaguggcgggagaagaccccggaacccccaguccccugcgugccagagcagaccgaguaugccacgauuguauuucccagcgggaugggcacuuccagcccggcacgcaggggcagugccgaugggccacgguccgcccaaccccugaggcccgaagacggucacuguagcuggccacuguga

SEQ ID NO: 101 - RNA, 450 nt, Artificial Sequence
  PDCD1(1-149) CDS mRNA opt7
augcagaucccccaagccccauggccgguggucugggcagugcugcagcucggcuggaggcccgggugguuccuggacagcccagaucggcccuggaacccacccaccuuuuccccagccuugcugguagugacugagggugacaaugcgaccuucacgugcaguuuuagcaacacuuccgaaaguuucguccucaauugguaccgcaugagcccguccaaccagaccgauaagcuggccgcauuucccgaggacaggagccagccaggccaagauugucgguuccgcgugacccaguugcccaaugggagggacuuucacauguccgugguccgggcccgcaggaacgauaguggcacuuaucugugcggugcaauuagccucgccccaaaagcgcagaucaaggaaucccugcgggccgagcugcgcgugaccgaaaggcgggcauga

SEQ ID NO: 102 - RNA, 660 nt, Artificial Sequence
  IL12A CDS mRNA opt7
augugccccgccaggagccugcuccugguggcaaccuugguccugcucgaccaccuguccuuggcccggaaccugccaguggcgacuccggaucccggcauguucccaugucuccaucacagucagaaucugcugcgcgccguaagcaacaugcuccaaaaggcaaggcagacccuggaguuuuaccccugcacguccgaagagaucgaccaugaagauauuacuaaagacaagaccaguaccguggaggccuguuugccacuggaacucacuaaaaaugagagcugccugaacucccgggagaccagcuucaucacgaauggguccugucuggcaagucgcaagacuagcuuuaugauggccuugugccucuccagcauuuaugaagaucugaaaauguaccaggucgaguucaagaccaugaacgcgaagcugcucauggaccccaaaaggcagaucuuucuggaucaaaauauguuggccgugauugacgaacugaugcaggcacucaacuucaauagugagacugugccacagaaguccagccuggaggaaccggauuuuuauaaaaccaagaucaaacuguguaucuugcuccacgccuuccggauucgcgccgucaccaucgacagggugauguccuaccugaacgcaaguuga

SEQ ID NO: 103 - RNA, 657 nt, Artificial Sequence
  IL12A(1-219) CDS mRNA opt7
augugccccgccaggagccugcuccugguggcaaccuugguccugcucgaccaccuguccuuggcccggaaccugccaguggcgacuccggaucccggcauguucccaugucuccaucacagucagaaucugcugcgcgccguaagcaacaugcuccaaaaggcaaggcagacccuggaguuuuaccccugcacguccgaagagaucgaccaugaagauauuacuaaagacaagaccaguaccguggaggccuguuugccacuggaacucacuaaaaaugagagcugccugaacucccgggagaccagcuucaucacgaauggguccugucuggcaagucgcaagacuagcuuuaugauggccuugugccucuccagcauuuaugaagaucugaaaauguaccaggucgaguucaagaccaugaacgcgaagcugcucauggaccccaaaaggcagaucuuucuggaucaaaauauguuggccgugauugacgaacugaugcaggcacucaacuucaauagugagacugugccacagaaguccagccuggaggaaccggauuuuuauaaaaccaagaucaaacuguguaucuugcuccacgccuuccggauucgcgccgucaccaucgacagggugauguccuaccugaacgcaagu

SEQ ID NO: 104 - RNA, 594 nt, Artificial Sequence
  IL12A(23-219) CDS mRNA opt7
cggaaccugccaguggcgacuccggaucccggcauguucccaugucuccaucacagucagaaucugcugcgcgccguaagcaacaugcuccaaaaggcaaggcagacccuggaguuuuaccccugcacguccgaagagaucgaccaugaagauauuacuaaagacaagaccaguaccguggaggccuguuugccacuggaacucacuaaaaaugagagcugccugaacucccgggagaccagcuucaucacgaauggguccugucuggcaagucgcaagacuagcuuuaugauggccuugugccucuccagcauuuaugaagaucugaaaauguaccaggucgaguucaagaccaugaacgcgaagcugcucauggaccccaaaaggcagaucuuucuggaucaaaauauguuggccgugauugacgaacugaugcaggcacucaacuucaauagugagacugugccacagaaguccagccuggaggaaccggauuuuuauaaaaccaagaucaaacuguguaucuugcuccacgccuuccggauucgcgccgucaccaucgacagggugauguccuaccugaacgcaaguuga

SEQ ID NO: 105 - RNA, 987 nt, Artificial Sequence
  IL12B CDS mRNA opt7
augugccaccagcaacuggugaucagcugguucucccucgucuuucuggccagucccuugguggcaauuugggagcugaagaaagacguauacguggucgaacucgauugguauccagacgccccgggcgagaugguggugcugaccugugauacucccgaagaggacgggaucaccuggacguuggaucagagcuccgaaguccuggguaguggcaagacucucaccauucaggugaaagaguucggggacgcgggccaguauaccugccauaaggguggggagguacugagccacucccugcuccuguugcauaaaaaggaagauggcaucuggagcacugacauucugaaggaucaaaaagagccaaagaacaaaaccuuucucaggugugaagccaagaauuacuccggccgguucacgugcugguggcugacuaccaucaguacugaccugaccuuuagcgugaaauccagccgcgggaguuccgauccccagggugucaccuguggcgcagccacguugagcgcagagagggugcgcggggacaacaaggaguacgaauauuccguggagugccaggaagauagugccuguccagcggccgaggaaagccuccccaucgaggucaugguggacgcaguacacaaacugaaguacgagaauuauacuuccagcuucuuuauucgggacaucauuaagccagauccgcccaaaaaccugcagcucaagccacugaaaaauaguaggcaaguggaagucuccugggaguaccccgacaccuggagcacuccacauaguuacuucuccuugaccuuuugcguccaggugcagggcaagagcaaacgggaaaagaaggaucgcguguucaccgacaaaacuagcgccacggugaucuguaggaagaacgccuccauuaguguacgggcacaggaucgcuauuacagcuccagcuggagugagugggccuccgugcccugcagcuga

SEQ ID NO: 106 - RNA, 984 nt, Artificial Sequence
  IL12B(1-328) CDS mRNA opt7
augugccaccagcaacuggugaucagcugguucucccucgucuuucuggccagucccuugguggcaauuugggagcugaagaaagacguauacguggucgaacucgauugguauccagacgccccgggcgagaugguggugcugaccugugauacucccgaagaggacgggaucaccuggacguuggaucagagcuccgaaguccuggguaguggcaagacucucaccauucaggugaaagaguucggggacgcgggccaguauaccugccauaaggguggggagguacugagccacucccugcuccuguugcauaaaaaggaagauggcaucuggagcacugacauucugaaggaucaaaaagagccaaagaacaaaaccuuucucaggugugaagccaagaauuacuccggccgguucacgugcugguggcugacuaccaucaguacugaccugaccuuuagcgugaaauccagccgcgggaguuccgauccccagggugucaccuguggcgcagccacguugagcgcagagagggugcgcggggacaacaaggaguacgaauauuccguggagugccaggaagauagugccuguccagcggccgaggaaagccuccccaucgaggucaugguggacgcaguacacaaacugaaguacgagaauuauacuuccagcuucuuuauucgggacaucauuaagccagauccgcccaaaaaccugcagcucaagccacugaaaaauaguaggcaaguggaagucuccugggaguaccccgacaccuggagcacuccacauaguuacuucuccuugaccuuuugcguccaggugcagggcaagagcaaacgggaaaagaaggaucgcguguucaccgacaaaacuagcgccacggugaucuguaggaagaacgccuccauuaguguacgggcacaggaucgcuauuacagcuccagcuggagugagugggccuccgugcccugcagc

SEQ ID NO: 107 - RNA, 921 nt, Artificial Sequence
  IL12B(23-328) CDS mRNA opt7
auuugggagcugaagaaagacguauacguggucgaacucgauugguauccagacgccccgggcgagaugguggugcugaccugugauacucccgaagaggacgggaucaccuggacguuggaucagagcuccgaaguccuggguaguggcaagacucucaccauucaggugaaagaguucggggacgcgggccaguauaccugccauaaggguggggagguacugagccacucccugcuccuguugcauaaaaaggaagauggcaucuggagcacugacauucugaaggaucaaaaagagccaaagaacaaaaccuuucucaggugugaagccaagaauuacuccggccgguucacgugcugguggcugacuaccaucaguacugaccugaccuuuagcgugaaauccagccgcgggaguuccgauccccagggugucaccuguggcgcagccacguugagcgcagagagggugcgcggggacaacaaggaguacgaauauuccguggagugccaggaagauagugccuguccagcggccgaggaaagccuccccaucgaggucaugguggacgcaguacacaaacugaaguacgagaauuauacuuccagcuucuuuauucgggacaucauuaagccagauccgcccaaaaaccugcagcucaagccacugaaaaauaguaggcaaguggaagucuccugggaguaccccgacaccuggagcacuccacauaguuacuucuccuugaccuuuugcguccaggugcagggcaagagcaaacgggaaaagaaggaucgcguguucaccgacaaaacuagcgccacggugaucuguaggaagaacgccuccauuaguguacgggcacaggaucgcuauuacagcuccagcuggagugagugggccuccgugcccugcagcuga

SEQ ID NO: 108 - RNA, 54 nt, Artificial Sequence
  Linker-sFvCC49-218 CDS mRNA opt7
ggcagcaccuccgggagugguaagcccggcagcggggagggcuccacuaaaggu

SEQ ID NO: 109 - RNA, 1632 nt, Artificial Sequence
  IL12 CDS mRNA opt7
augugccaccagcaacuggugaucagcugguucucccucgucuuucuggccagucccuugguggcaauuugggagcugaagaaagacguauacguggucgaacucgauugguauccagacgccccgggcgagaugguggugcugaccugugauacucccgaagaggacgggaucaccuggacguuggaucagagcuccgaaguccuggguaguggcaagacucucaccauucaggugaaagaguucggggacgcgggccaguauaccugccauaaggguggggagguacugagccacucccugcuccuguugcauaaaaaggaagauggcaucuggagcacugacauucugaaggaucaaaaagagccaaagaacaaaaccuuucucaggugugaagccaagaauuacuccggccgguucacgugcugguggcugacuaccaucaguacugaccugaccuuuagcgugaaauccagccgcgggaguuccgauccccagggugucaccuguggcgcagccacguugagcgcagagagggugcgcggggacaacaaggaguacgaauauuccguggagugccaggaagauagugccuguccagcggccgaggaaagccuccccaucgaggucaugguggacgcaguacacaaacugaaguacgagaauuauacuuccagcuucuuuauucgggacaucauuaagccagauccgcccaaaaaccugcagcucaagccacugaaaaauaguaggcaaguggaagucuccugggaguaccccgacaccuggagcacuccacauaguuacuucuccuugaccuuuugcguccaggugcagggcaagagcaaacgggaaaagaaggaucgcguguucaccgacaaaacuagcgccacggugaucuguaggaagaacgccuccauuaguguacgggcacaggaucgcuauuacagcuccagcuggagugagugggccuccgugcccugcagcggcagcaccuccgggagugguaagcccggcagcggggagggcuccacuaaaggucggaaccugccaguggcgacuccggaucccggcauguucccaugucuccaucacagucagaaucugcugcgcgccguaagcaacaugcuccaaaaggcaaggcagacccuggaguuuuaccccugcacguccgaagagaucgaccaugaagauauuacuaaagacaagaccaguaccguggaggccuguuugccacuggaacucacuaaaaaugagagcugccugaacucccgggagaccagcuucaucacgaauggguccugucuggcaagucgcaagacuagcuuuaugauggccuugugccucuccagcauuuaugaagaucugaaaauguaccaggucgaguucaagaccaugaacgcgaagcugcucauggaccccaaaaggcagaucuuucuggaucaaaauauguuggccgugauugacgaacugaugcaggcacucaacuucaauagugagacugugccacagaaguccagccuggaggaaccggauuuuuauaaaaccaagaucaaacuguguaucuugcuccacgccuuccggauucgcgccgucaccaucgacagggugauguccuaccugaacgcaaguuga

SEQ ID NO: 110 - RNA, 786 nt, Artificial Sequence
  CD40LG CDS mRNA opt7
augaucgagaccuacaaccagacuagccccagguccgccgcaaccggccugccaauuaguaugaagaucuucauguaucuccugacgguguuuuugauuacucaaaugaucgggagcgcccuguucgcggucuaccuccaccggcgccuggacaaaauugaagaugagaggaauuugcaugaagacuuuguguucaugaagaccauccagcggugcaacaccggugagcgcucccugagucuccugaauugugaagagaucaaaagccaguuugagggcuucguaaaggauauuaugcugaacaaagaagagacuaagaaggaaaauuccuuugagaugcagaaaggggaccaaaacccgcagaucgccgcacacgugauuagcgaggccuccaguaagaccacgagcguccuccagugggcagaaaaaggcuauuacacuauguccaauaaccuggugaccuuggagaaugguaagcagcugacugugaaaaggcaagggcucuauuacaucuaugcccaggucaccuucugcagcaaccgggaagcgaguucccaggcccccuuuauugcaagccugugucugaaguccccaggccgcuucgagaggaucuugcuccgggccgccaauacccauaguagcgcaaaacccugcggccagcaauccauucaccucggggguguguuugaacugcagccaggcgccagcguauucgugaacgucacggaucccagucaggugucccaugggacuggcuucaccagcuuuggucugcugaaguuguga

SEQ ID NO: 111 - RNA, 867 nt, Artificial Sequence
  PDCD1 CDS mRNA opt8
augcaaaucccacaagcccccuggcccguagucugggccguacuacaacuaggcuggagacccggcugguuucucgacagccccgaccgacccuggaacccccccaccuucucacccgcccuccucgucgucaccgaaggcgacaacgccacauucacaugcuccuucuccaacaccucugaaucauucguccuaaacugguaccgaaugucacccuccaaccaaacugacaaacucgccgccuuucccgaagaccgcucccaacccggccaagacugccgauuccgagucacacaacuuccuaacggcagagacuuccacauguccguaguccgagcccgccgaaacgacuccggaaccuaccucugcggagccaucucccucgcccccaaagcccaaaucaaagaaucccuccgagcagaacuccgcgucaccgaacgccgcgccgaaguccccaccgcacacccaucacccuccccccgccccgccggccaauuccaaacacuuguaguaggcgucgucggcggccuccuuggaucacucguccuacuuguauggguccuagccgucaucugcucucgcgccgcacgcggcaccaucggcgcacgacgaaccggccaaccucuaaaagaagaccccuccgcaguccccgucuucuccgucgacuacggcgaacucgacuuccaauggcgcgaaaaaacccccgaacccccaguccccugcguacccgaacaaaccgaauacgcaacaaucguauuccccucaggaaugggcaccucaucccccgcccgacgaggaucagccgacggcccacgauccgcccaaccccuccgaccagaagacggccacugcucauggccccuuuaa

SEQ ID NO: 112 - RNA, 450 nt, Artificial Sequence
  PDCD1(1-149) CDS mRNA opt8
augcaaaucccacaagcccccuggcccguagucugggccguacuacaacuaggcuggagacccggcugguuucucgacagccccgaccgacccuggaacccccccaccuucucacccgcccuccucgucgucaccgaaggcgacaacgccacauucacaugcuccuucuccaacaccucugaaucauucguccuaaacugguaccgaaugucacccuccaaccaaacugacaaacucgccgccuuucccgaagaccgcucccaacccggccaagacugccgauuccgagucacacaacuuccuaacggcagagacuuccacauguccguaguccgagcccgccgaaacgacuccggaaccuaccucugcggagccaucucccucgcccccaaagcccaaaucaaagaaucccuccgagcagaacuccgcgucaccgaacgccgcgccuaa

SEQ ID NO: 113 - RNA, 660 nt, Artificial Sequence
  IL12A CDS mRNA opt8
augugccccgccagaucccuccuacucgucgcaacacuuguccuccucgaccaccucucccucgcccgcaaucuccccgucgccacccccgaccccggaauguuucccugccuccaccacucacaaaaccuccuacgcgccgucucaaacaugcuucaaaaagcccgacaaacccucgaauuuuaccccugcaccuccgaagaaaucgaccacgaagacauaaccaaagacaaaaccuccaccgucgaagccugccuaccauuagaacuaaccaaaaacgaauccugccucaacucacgcgaaaccuccuucaucacaaacggcucaugccucgccucacgcaaaaccuccuucaugauggcccucugccuaucaucaaucuaugaagaccucaaaauguaccaaguagaauuuaaaaccaugaacgccaaacuccucauggaccccaaacgccaaaucuuccucgaccaaaacaugcucgcagucaucgacgaacucaugcaagcccucaacuucaacucagaaacagucccacaaaaauccucccucgaagaacccgacuucuauaaaaccaaaaucaaacucugcauccuccuccacgccuuccgcauacgcgccguaaccaucgaccgcguaaugucauaccuaaaugccucuuaa

SEQ ID NO: 114 - RNA, 657 nt, Artificial Sequence
  IL12A(1-219) CDS mRNA opt8
augugccccgccagaucccuccuacucgucgcaacacuuguccuccucgaccaccucucccucgcccgcaaucuccccgucgccacccccgaccccggaauguuucccugccuccaccacucacaaaaccuccuacgcgccgucucaaacaugcuucaaaaagcccgacaaacccucgaauuuuaccccugcaccuccgaagaaaucgaccacgaagacauaaccaaagacaaaaccuccaccgucgaagccugccuaccauuagaacuaaccaaaaacgaauccugccucaacucacgcgaaaccuccuucaucacaaacggcucaugccucgccucacgcaaaaccuccuucaugauggcccucugccuaucaucaaucuaugaagaccucaaaauguaccaaguagaauuuaaaaccaugaacgccaaacuccucauggaccccaaacgccaaaucuuccucgaccaaaacaugcucgcagucaucgacgaacucaugcaagcccucaacuucaacucagaaacagucccacaaaaauccucccucgaagaacccgacuucuauaaaaccaaaaucaaacucugcauccuccuccacgccuuccgcauacgcgccguaaccaucgaccgcguaaugucauaccuaaaugccucu

SEQ ID NO: 115 - RNA, 594 nt, Artificial Sequence
  IL12A(23-219) CDS mRNA opt8
cgcaaucuccccgucgccacccccgaccccggaauguuucccugccuccaccacucacaaaaccuccuacgcgccgucucaaacaugcuucaaaaagcccgacaaacccucgaauuuuaccccugcaccuccgaagaaaucgaccacgaagacauaaccaaagacaaaaccuccaccgucgaagccugccuaccauuagaacuaaccaaaaacgaauccugccucaacucacgcgaaaccuccuucaucacaaacggcucaugccucgccucacgcaaaaccuccuucaugauggcccucugccuaucaucaaucuaugaagaccucaaaauguaccaaguagaauuuaaaaccaugaacgccaaacuccucauggaccccaaacgccaaaucuuccucgaccaaaacaugcucgcagucaucgacgaacucaugcaagcccucaacuucaacucagaaacagucccacaaaaauccucccucgaagaacccgacuucuauaaaaccaaaaucaaacucugcauccuccuccacgccuuccgcauacgcgccguaaccaucgaccgcguaaugucauaccuaaaugccucuuaa

SEQ ID NO: 116 - RNA, 987 nt, Artificial Sequence
  IL12B CDS mRNA opt8
augugccaccaacaacucgucauaagcugguucagccuaguauuccucgccucaccccucgucgccaucugggaacucaagaaagacguauacgucgucgaacuagacugguaccccgacgcacccggagaaaugguaguacucacaugcgacacccccgaagaagacggcaucacauggaccuuagaccaaucaucagaaguccucggauccggaaaaacccucacaauccaagucaaagaguucggcgacgccggccaauacacaugccacaaaggcggagaaguccucucacacucacuccuucuacuacacaagaaagaagacggcaucugguccaccgacauacucaaagaccaaaaagaacccaaaaacaaaaccuuccuccgcugcgaagccaaaaacuacuccggccgauucacaugcugguggcucaccaccaucuccaccgaccugaccuucuccgucaaauccagcaggggcuccucagacccacaaggcguaaccugcggcgcagccacccuaucggccgaacgaguccgcggagacaacaaagaauacgaauacagcgucgaaugccaagaagacucagcaugcccagcagccgaagaaucacuccccaucgaagucauggucgacgccguccacaaacuaaaauacgaaaacuacacaagcucauucuucauccgcgacauaaucaaacccgacccaccgaaaaaccuccaacucaaaccccuuaaaaacagccgccaagucgaagucuccugggaauaccccgacaccugguccacaccccacuccuacuucucacucaccuucugcguccaaguccaaggcaaauccaaacgcgaaaagaaagaccgcguauucaccgacaaaaccuccgccacagucaucugccgcaaaaacgccucaaucuccguccgcgcccaagaccgauacuacagcuccuccuggucagaaugggccuccgucccaugcuccuaa

SEQ ID NO: 117 - RNA, 984 nt, Artificial Sequence
  IL12B(1-328) CDS mRNA opt8
augugccaccaacaacucgucauaagcugguucagccuaguauuccucgccucaccccucgucgccaucugggaacucaagaaagacguauacgucgucgaacuagacugguaccccgacgcacccggagaaaugguaguacucacaugcgacacccccgaagaagacggcaucacauggaccuuagaccaaucaucagaaguccucggauccggaaaaacccucacaauccaagucaaagaguucggcgacgccggccaauacacaugccacaaaggcggagaaguccucucacacucacuccuucuacuacacaagaaagaagacggcaucugguccaccgacauacucaaagaccaaaaagaacccaaaaacaaaaccuuccuccgcugcgaagccaaaaacuacuccggccgauucacaugcugguggcucaccaccaucuccaccgaccugaccuucuccgucaaauccagcaggggcuccucagacccacaaggcguaaccugcggcgcagccacccuaucggccgaacgaguccgcggagacaacaaagaauacgaauacagcgucgaaugccaagaagacucagcaugcccagcagccgaagaaucacuccccaucgaagucauggucgacgccguccacaaacuaaaauacgaaaacuacacaagcucauucuucauccgcgacauaaucaaacccgacccaccgaaaaaccuccaacucaaaccccuuaaaaacagccgccaagucgaagucuccugggaauaccccgacaccugguccacaccccacuccuacuucucacucaccuucugcguccaaguccaaggcaaauccaaacgcgaaaagaaagaccgcguauucaccgacaaaaccuccgccacagucaucugccgcaaaaacgccucaaucuccguccgcgcccaagaccgauacuacagcuccuccuggucagaaugggccuccgucccaugcucc

SEQ ID NO: 118 - RNA, 921 nt, Artificial Sequence
  IL12B(23-328) CDS mRNA opt8
aucugggaacucaagaaagacguauacgucgucgaacuagacugguaccccgacgcacccggagaaaugguaguacucacaugcgacacccccgaagaagacggcaucacauggaccuuagaccaaucaucagaaguccucggauccggaaaaacccucacaauccaagucaaagaguucggcgacgccggccaauacacaugccacaaaggcggagaaguccucucacacucacuccuucuacuacacaagaaagaagacggcaucugguccaccgacauacucaaagaccaaaaagaacccaaaaacaaaaccuuccuccgcugcgaagccaaaaacuacuccggccgauucacaugcugguggcucaccaccaucuccaccgaccugaccuucuccgucaaauccagcaggggcuccucagacccacaaggcguaaccugcggcgcagccacccuaucggccgaacgaguccgcggagacaacaaagaauacgaauacagcgucgaaugccaagaagacucagcaugcccagcagccgaagaaucacuccccaucgaagucauggucgacgccguccacaaacuaaaauacgaaaacuacacaagcucauucuucauccgcgacauaaucaaacccgacccaccgaaaaaccuccaacucaaaccccuuaaaaacagccgccaagucgaagucuccugggaauaccccgacaccugguccacaccccacuccuacuucucacucaccuucugcguccaaguccaaggcaaauccaaacgcgaaaagaaagaccgcguauucaccgacaaaaccuccgccacagucaucugccgcaaaaacgccucaaucuccguccgcgcccaagaccgauacuacagcuccuccuggucagaaugggccuccgucccaugcuccuaa

SEQ ID NO: 119 - RNA, 54 nt, Artificial Sequence
  Linker-sFvCC49-218 CDS mRNA opt8
gggagcacgagcgggagcgggaagccgggaaguggagagggaaguacaaaggga

SEQ ID NO: 120 - RNA, 1632 nt, Artificial Sequence
  IL12 CDS mRNA opt8
augugccaccaacaacucgucauaagcugguucagccuaguauuccucgccucaccccucgucgccaucugggaacucaagaaagacguauacgucgucgaacuagacugguaccccgacgcacccggagaaaugguaguacucacaugcgacacccccgaagaagacggcaucacauggaccuuagaccaaucaucagaaguccucggauccggaaaaacccucacaauccaagucaaagaguucggcgacgccggccaauacacaugccacaaaggcggagaaguccucucacacucacuccuucuacuacacaagaaagaagacggcaucugguccaccgacauacucaaagaccaaaaagaacccaaaaacaaaaccuuccuccgcugcgaagccaaaaacuacuccggccgauucacaugcugguggcucaccaccaucuccaccgaccugaccuucuccgucaaauccagcaggggcuccucagacccacaaggcguaaccugcggcgcagccacccuaucggccgaacgaguccgcggagacaacaaagaauacgaauacagcgucgaaugccaagaagacucagcaugcccagcagccgaagaaucacuccccaucgaagucauggucgacgccguccacaaacuaaaauacgaaaacuacacaagcucauucuucauccgcgacauaaucaaacccgacccaccgaaaaaccuccaacucaaaccccuuaaaaacagccgccaagucgaagucuccugggaauaccccgacaccugguccacaccccacuccuacuucucacucaccuucugcguccaaguccaaggcaaauccaaacgcgaaaagaaagaccgcguauucaccgacaaaaccuccgccacagucaucugccgcaaaaacgccucaaucuccguccgcgcccaagaccgauacuacagcuccuccuggucagaaugggccuccgucccaugcuccgggagcacgagcgggagcgggaagccgggaaguggagagggaaguacaaagggacgcaaucuccccgucgccacccccgaccccggaauguuucccugccuccaccacucacaaaaccuccuacgcgccgucucaaacaugcuucaaaaagcccgacaaacccucgaauuuuaccccugcaccuccgaagaaaucgaccacgaagacauaaccaaagacaaaaccuccaccgucgaagccugccuaccauuagaacuaaccaaaaacgaauccugccucaacucacgcgaaaccuccuucaucacaaacggcucaugccucgccucacgcaaaaccuccuucaugauggcccucugccuaucaucaaucuaugaagaccucaaaauguaccaaguagaauuuaaaaccaugaacgccaaacuccucauggaccccaaacgccaaaucuuccucgaccaaaacaugcucgcagucaucgacgaacucaugcaagcccucaacuucaacucagaaacagucccacaaaaauccucccucgaagaacccgacuucuauaaaaccaaaaucaaacucugcauccuccuccacgccuuccgcauacgcgccguaaccaucgaccgcguaaugucauaccuaaaugccucuuaa

SEQ ID NO: 121 - RNA, 786 nt, Artificial Sequence
  CD40LG CDS mRNA opt8
augauagaaaccuacaaccaaaccucuccccgauccgcagccaccggccuccccaucuccaugaaaaucuucauguaccuccuaaccgucuuccuaaucacucaaaugaucggcuccgcucucuucgcagucuaccuccaccgccgccuagacaaaaucgaagacgaacgcaaccuacacgaagacuucgucuucaugaaaaccauucaacgcugcaacacaggcgaacgaucccuaucccuacucaacugcgaagaaaucaaaucccaauucgaaggcuuuguaaaagacaucaugcucaacaaagaagaaaccaaaaaagaaaacuccuucgaaaugcaaaaaggcgaccaaaacccccaaauagccgcccaugucauaucagaagccuccuccaaaaccaccuccguccuccaaugggccgaaaaaggcuacuacaccauguccaacaaccuaguaacccuugaaaacggcaaacaacucaccguaaaacgccaaggccucuacuacaucuacgcccaagucaccuucugcuccaacagagaagcauccucccaagcacccuucaucgccucccuaugccucaaaucccccggccgcuucgaacgaauccuccuccgcgccgccaacacucacuccucagccaaacccugcggccaacaaaguauacaccuuggcggagucuucgaacuccaacccggcgccuccgucuucguaaacgucaccgaccccucacaagucucccacggaaccggauucaccuccuucggccuacuaaaacuauag

SEQ ID NO: 122 - RNA, 867 nt, Artificial Sequence
  PDCD1 CDS mRNA opt9
augcaaaucccccaagccccauggcccgucgucugggccguccuccaacucggcuggcgccccggaugguuccuagacucuccagaccgccccuggaauccacccaccuucucccccgcccuccuagucgucaccgaaggcgacaacgccaccuucaccuguucauucuccaacaccucagaauccuucguacucaacugguaccgcauguccccaagcaaccaaacagacaaacucgccgccuuccccgaagaccgcucccaacccggucaagacugccgauuccgcgucacccaacuccccaacggacgcgacuuccacauguccgucguucgagcacgacgcaacgacucaggcacauaccuaugcggagccaucucccuagcccccaaagcccaaaucaaagaaucacuacgcgccgaacuccgcgucaccgaacgccgcgccgaaguacccacagcccacccauccccaucaccacgcccagcaggucaauuccaaaccuuagucgucggagucgucggcggccuccuaggcucacucguccuccuagucuggguccucgccgucauaugcagccgcgccgcacgcggcaccaucggcgccagacgcaccggacaaccccucaaagaagaccccucagccguccccgucuuuuccgucgacuacggcgaacuagacuuccaauggcgcgaaaaaacccccgaaccccccgucccaugcguacccgaacaaaccgaauacgccacaauagucuucccauccggcaugggaaccucaucacccgccagacgaggcucagcagauggcccccgcuccgcacaaccacuccgaccagaagacggccacugcagcuggccccuguaa

SEQ ID NO: 123 - RNA, 450 nt, Artificial Sequence
  PDCD1(1-149) CDS mRNA opt9
augcaaaucccccaagccccauggcccgucgucugggccguccuccaacucggcuggcgccccggaugguuccuagacucuccagaccgccccuggaauccacccaccuucucccccgcccuccuagucgucaccgaaggcgacaacgccaccuucaccuguucauucuccaacaccucagaauccuucguacucaacugguaccgcauguccccaagcaaccaaacagacaaacucgccgccuuccccgaagaccgcucccaacccggucaagacugccgauuccgcgucacccaacuccccaacggacgcgacuuccacauguccgucguucgagcacgacgcaacgacucaggcacauaccuaugcggagccaucucccuagcccccaaagcccaaaucaaagaaucacuacgcgccgaacuccgcgucaccgaacgccgcgccuaa

SEQ ID NO: 124 - RNA, 660 nt, Artificial Sequence
  IL12A CDS mRNA opt9
augugccccgccagaucccuccuccucgucgcaacccucguccuccucgaccaccucucccuagcacguaaccucccagucgccaccccagaccccggaauguuccccugccuccaucacucccaaaaucuccuccgugccgucuccaacaugcuccaaaaagcccgccaaacccucgaauuuuauccaugcaccuccgaagaaauagaccaugaagacaucaccaaagacaaaacauccaccgucgaagccugccucccccucgaacucacaaaaaacgaaucaugccucaacucccgcgaaaccuccuucauaaccaacggcucaugccucgccucucgcaaaaccucauucaugauggcccucugccuauccucuaucuacgaagaccucaaaauguaccaagucgaauuuaaaaccaugaacgccaaacuccucauggaccccaaacgccaaaucuuccucgaccaaaacaugcucgcagucaucgacgaacucaugcaagcacucaacuucaacucagaaaccgucccccaaaaauccucccucgaagaacccgacuucuacaaaacaaaaauaaaacucugcauccuccuccacgccuuccgcauccgagcagucaccaucgaucgcgucauguccuaccuaaacgccuccuaa

SEQ ID NO: 125 - RNA, 657 nt, Artificial Sequence
  IL12A(1-219) CDS mRNA opt9
augugccccgccagaucccuccuccucgucgcaacccucguccuccucgaccaccucucccuagcacguaaccucccagucgccaccccagaccccggaauguuccccugccuccaucacucccaaaaucuccuccgugccgucuccaacaugcuccaaaaagcccgccaaacccucgaauuuuauccaugcaccuccgaagaaauagaccaugaagacaucaccaaagacaaaacauccaccgucgaagccugccucccccucgaacucacaaaaaacgaaucaugccucaacucccgcgaaaccuccuucauaaccaacggcucaugccucgccucucgcaaaaccucauucaugauggcccucugccuauccucuaucuacgaagaccucaaaauguaccaagucgaauuuaaaaccaugaacgccaaacuccucauggaccccaaacgccaaaucuuccucgaccaaaacaugcucgcagucaucgacgaacucaugcaagcacucaacuucaacucagaaaccgucccccaaaaauccucccucgaagaacccgacuucuacaaaacaaaaauaaaacucugcauccuccuccacgccuuccgcauccgagcagucaccaucgaucgcgucauguccuaccuaaacgccucc

SEQ ID NO: 126 - RNA, 594 nt, Artificial Sequence
  IL12A(23-219) CDS mRNA opt9
cguaaccucccagucgccaccccagaccccggaauguuccccugccuccaucacucccaaaaucuccuccgugccgucuccaacaugcuccaaaaagcccgccaaacccucgaauuuuauccaugcaccuccgaagaaauagaccaugaagacaucaccaaagacaaaacauccaccgucgaagccugccucccccucgaacucacaaaaaacgaaucaugccucaacucccgcgaaaccuccuucauaaccaacggcucaugccucgccucucgcaaaaccucauucaugauggcccucugccuauccucuaucuacgaagaccucaaaauguaccaagucgaauuuaaaaccaugaacgccaaacuccucauggaccccaaacgccaaaucuuccucgaccaaaacaugcucgcagucaucgacgaacucaugcaagcacucaacuucaacucagaaaccgucccccaaaaauccucccucgaagaacccgacuucuacaaaacaaaaauaaaacucugcauccuccuccacgccuuccgcauccgagcagucaccaucgaucgcgucauguccuaccuaaacgccuccuaa

SEQ ID NO: 127 - RNA, 987 nt, Artificial Sequence
  IL12B CDS mRNA opt9
augugucaccaacaacuuguaaucagcugguucucccucgucuuccucgccucaccccucgucgccaucugggaacucaaaaaagacgucuacguagucgaacucgacugguaccccgacgccccaggagaaauggucguacucaccugugacacccccgaagaagacggcaucaccuggacccucgaccaauccuccgaaguccucgguucaggaaaaacccucaccauccaaguaaaagaauuuggcgacgccgggcaauauaccugccacaaaggcggcgagguccuaucccacucacuccuccuccuccacaagaaagaagacggaaucugguccaccgacauccuuaaagaccaaaaagaaccaaaaaacaaaacauuccuccgcugcgaagccaaaaacuacagcggccgcuucaccuguugguggcuaaccacaauaucaaccgacuuaaccuucagcgucaaauccuccagaggauccagcgacccacaaggaguuaccugcggagccgcaacacucagcgccgaacgaguccgcggagacaacaaagaauacgaauacuccgucgaaugccaagaagacucagcaugccccgccgcagaagaaucccuacccaucgaaguaaugguagacgccguccacaaacucaaauacgaaaacuacaccagcuccuucuucauccgagacaucaucaaacccgaccccccaaaaaaccuccaacuaaaaccccucaaaaacagccgccaaguagaaguauccugggaauaccccgacaccugguccacaccccacuccuacuucucgcucacguucugcguccaaguccaaggcaaauccaaacgagaaaaaaaagaccgcgucuucaccgacaaaacuuccgccaccgucaucugccgcaaaaacgccagcaucagcguccgcgcacaagaccgcuacuacucaagcuccugguccgaaugggccuccgucccaugcucauaa

SEQ ID NO: 128 - RNA, 984 nt, Artificial Sequence
  IL12B(1-328) CDS mRNA opt9
augugucaccaacaacuuguaaucagcugguucucccucgucuuccucgccucaccccucgucgccaucugggaacucaaaaaagacgucuacguagucgaacucgacugguaccccgacgccccaggagaaauggucguacucaccugugacacccccgaagaagacggcaucaccuggacccucgaccaauccuccgaaguccucgguucaggaaaaacccucaccauccaaguaaaagaauuuggcgacgccgggcaauauaccugccacaaaggcggcgagguccuaucccacucacuccuccuccuccacaagaaagaagacggaaucugguccaccgacauccuuaaagaccaaaaagaaccaaaaaacaaaacauuccuccgcugcgaagccaaaaacuacagcggccgcuucaccuguugguggcuaaccacaauaucaaccgacuuaaccuucagcgucaaauccuccagaggauccagcgacccacaaggaguuaccugcggagccgcaacacucagcgccgaacgaguccgcggagacaacaaagaauacgaauacuccgucgaaugccaagaagacucagcaugccccgccgcagaagaaucccuacccaucgaaguaaugguagacgccguccacaaacucaaauacgaaaacuacaccagcuccuucuucauccgagacaucaucaaacccgaccccccaaaaaaccuccaacuaaaaccccucaaaaacagccgccaaguagaaguauccugggaauaccccgacaccugguccacaccccacuccuacuucucgcucacguucugcguccaaguccaaggcaaauccaaacgagaaaaaaaagaccgcgucuucaccgacaaaacuuccgccaccgucaucugccgcaaaaacgccagcaucagcguccgcgcacaagaccgcuacuacucaagcuccugguccgaaugggccuccgucccaugcuca

SEQ ID NO: 129 - RNA, 921 nt, Artificial Sequence
  IL12B(23-328) CDS mRNA opt9
aucugggaacucaaaaaagacgucuacguagucgaacucgacugguaccccgacgccccaggagaaauggucguacucaccugugacacccccgaagaagacggcaucaccuggacccucgaccaauccuccgaaguccucgguucaggaaaaacccucaccauccaaguaaaagaauuuggcgacgccgggcaauauaccugccacaaaggcggcgagguccuaucccacucacuccuccuccuccacaagaaagaagacggaaucugguccaccgacauccuuaaagaccaaaaagaaccaaaaaacaaaacauuccuccgcugcgaagccaaaaacuacagcggccgcuucaccuguugguggcuaaccacaauaucaaccgacuuaaccuucagcgucaaauccuccagaggauccagcgacccacaaggaguuaccugcggagccgcaacacucagcgccgaacgaguccgcggagacaacaaagaauacgaauacuccgucgaaugccaagaagacucagcaugccccgccgcagaagaaucccuacccaucgaaguaaugguagacgccguccacaaacucaaauacgaaaacuacaccagcuccuucuucauccgagacaucaucaaacccgaccccccaaaaaaccuccaacuaaaaccccucaaaaacagccgccaaguagaaguauccugggaauaccccgacaccugguccacaccccacuccuacuucucgcucacguucugcguccaaguccaaggcaaauccaaacgagaaaaaaaagaccgcgucuucaccgacaaaacuuccgccaccgucaucugccgcaaaaacgccagcaucagcguccgcgcacaagaccgcuacuacucaagcuccugguccgaaugggccuccgucccaugcucauaa

SEQ ID NO: 130 - RNA, 54 nt, Artificial Sequence
  Linker-sFvCC49-218 CDS mRNA opt9
gggaguacgagugggagugggaagccggggaguggggaggggaguacgaagggg

SEQ ID NO: 131 - RNA, 1632 nt, Artificial Sequence
  IL12 CDS mRNA opt9
augugucaccaacaacuuguaaucagcugguucucccucgucuuccucgccucaccccucgucgccaucugggaacucaaaaaagacgucuacguagucgaacucgacugguaccccgacgccccaggagaaauggucguacucaccugugacacccccgaagaagacggcaucaccuggacccucgaccaauccuccgaaguccucgguucaggaaaaacccucaccauccaaguaaaagaauuuggcgacgccgggcaauauaccugccacaaaggcggcgagguccuaucccacucacuccuccuccuccacaagaaagaagacggaaucugguccaccgacauccuuaaagaccaaaaagaaccaaaaaacaaaacauuccuccgcugcgaagccaaaaacuacagcggccgcuucaccuguugguggcuaaccacaauaucaaccgacuuaaccuucagcgucaaauccuccagaggauccagcgacccacaaggaguuaccugcggagccgcaacacucagcgccgaacgaguccgcggagacaacaaagaauacgaauacuccgucgaaugccaagaagacucagcaugccccgccgcagaagaaucccuacccaucgaaguaaugguagacgccguccacaaacucaaauacgaaaacuacaccagcuccuucuucauccgagacaucaucaaacccgaccccccaaaaaaccuccaacuaaaaccccucaaaaacagccgccaaguagaaguauccugggaauaccccgacaccugguccacaccccacuccuacuucucgcucacguucugcguccaaguccaaggcaaauccaaacgagaaaaaaaagaccgcgucuucaccgacaaaacuuccgccaccgucaucugccgcaaaaacgccagcaucagcguccgcgcacaagaccgcuacuacucaagcuccugguccgaaugggccuccgucccaugcucagggaguacgagugggagugggaagccggggaguggggaggggaguacgaaggggcguaaccucccagucgccaccccagaccccggaauguuccccugccuccaucacucccaaaaucuccuccgugccgucuccaacaugcuccaaaaagcccgccaaacccucgaauuuuauccaugcaccuccgaagaaauagaccaugaagacaucaccaaagacaaaacauccaccgucgaagccugccucccccucgaacucacaaaaaacgaaucaugccucaacucccgcgaaaccuccuucauaaccaacggcucaugccucgccucucgcaaaaccucauucaugauggcccucugccuauccucuaucuacgaagaccucaaaauguaccaagucgaauuuaaaaccaugaacgccaaacuccucauggaccccaaacgccaaaucuuccucgaccaaaacaugcucgcagucaucgacgaacucaugcaagcacucaacuucaacucagaaaccgucccccaaaaauccucccucgaagaacccgacuucuacaaaacaaaaauaaaacucugcauccuccuccacgccuuccgcauccgagcagucaccaucgaucgcgucauguccuaccuaaacgccuccuaa

SEQ ID NO: 132 - RNA, 786 nt, Artificial Sequence
  CD40LG CDS mRNA opt9
augaucgaaacauacaaccaaacauccccccgcuccgccgccacaggccuccccaucuccaugaaaaucuucauguaccuccucacaguauuccucaucacccaaaugaucggcuccgcacucuuugcagucuaucuccaccgucgccucgacaaaaucgaagacgaacgcaaccuccacgaagacuucgucuucaugaaaaccauacaacgcugcaacaccggcgaacgcucacucucccuacuaaacugcgaagaaaucaaaucccaauucgaaggcuucgucaaagacaucaugcuaaacaaagaagaaacaaaaaaagaaaacuccuucgaaaugcaaaaaggcgaccaaaacccccaaauagccgcccacgucaucuccgaagccuccuccaaaaccaccuccguccuccaaugggccgaaaaaggcuacuacacaauguccaacaaccucgucacccucgaaaacggcaaacaacucaccgucaaacgccaaggccucuacuacaucuacgcccaaguaaccuucugcuccaaccgcgaagccucaucucaagcucccuucaucgccucacucugccucaaaucacccggccgcuucgaaagaauccuccuccgcgccgcaaacacccacucauccgccaaacccugcggccaacaauccauacaccucggcggcguuuucgagcuccaaccuggcgccuccgucuucguaaacgucaccgaccccucacaagucucccacgguaccggcuucaccuccuucggacuccuaaaacucuaa

SEQ ID NO: 133 - RNA, 867 nt, Artificial Sequence
  PDCD1 CDS mRNA opt10
augcaaaucccccaagcccccuggccggucgucugggccguccuccaacucggcuggcgccccggaugguuccucgacucccccgaccgcccguggaacccccccaccuucucccccgcccuccuagucgucaccgaaggcgacaacgccaccuucaccuguuccuucuccaacaccucagaauccuucguccucaacugguaccgcaugucccccuccaaccaaaccgacaaacucgccgccuuccccgaagaccgaucccaacccggccaagacugccgcuuccgcgucacacaacuucccaacggacgcgacuuucacauguccgucguccgcgcccgccgcaacgacuccggcaccuaccucugcggcgccaucucccucgcccccaaagcccaaaucaaagaaucccucagagccgaacuccgcgucaccgaacggcgcgccgaaguccccacugcccaccccucccccuccccccgccccgccggccaauuccaaacccucgucgucggcguugucggcggccuccucggcucacucguccuccucgucuggguacucgccgucaucugcucccgcgccgcgcgcggcaccaucggcgcgcgccgcaccggacaaccccuaaaagaagaccccuccgccguccccgucuucuccgucgacuacggcgaacucgacuuccaauggcgcgaaaaaaccccggaaccccccgucccgugcguccccgaacaaacagaauacgcgaccaucgucuucccguccggcaugggcacauccucacccgcccgccgaggcuccgccgacggcccccgauccgcccaaccccuacgccccgaagacggccacugcuccuggccccucuaa

SEQ ID NO: 134 - RNA, 450 nt, Artificial Sequence
  PDCD1(1-149) CDS mRNA opt10
augcaaaucccccaagcccccuggccggucgucugggccguccuccaacucggcuggcgccccggaugguuccucgacucccccgaccgcccguggaacccccccaccuucucccccgcccuccuagucgucaccgaaggcgacaacgccaccuucaccuguuccuucuccaacaccucagaauccuucguccucaacugguaccgcaugucccccuccaaccaaaccgacaaacucgccgccuuccccgaagaccgaucccaacccggccaagacugccgcuuccgcgucacacaacuucccaacggacgcgacuuucacauguccgucguccgcgcccgccgcaacgacuccggcaccuaccucugcggcgccaucucccucgcccccaaagcccaaaucaaagaaucccucagagccgaacuccgcgucaccgaacggcgcgccuaa

SEQ ID NO: 135 - RNA, 660 nt, Artificial Sequence
  IL12A CDS mRNA opt10
augugccccgcccguucacuccuccucgucgccacccucguccuccuagaccaccucucccuggcccgcaaccucccagucgccacccccgaccccggcauguuccccugccuccaccacucccaaaaccuccuccgcgccgucuccaacaugcuccaaaaagcccgccaaacccucgaauuuuaccccugcaccuccgaagagaucgaccacgaagacaucaccaaagacaaaaccuccacagucgaagccugccucccccucgaacucaccaaaaacgaauccugccuuaacucccgcgaaaccuccuucaucaccaacggcuccugccucgccucccgcaaaaccuccuucaugauggcccucugccucuccuccaucuacgaagaccucaaaauguaccaagucgaauuuaaaaccaugaacgccaaacuccucauggaccccaaacgccaaaucuuccucgaccaaaacaugcucgccgucaucgacgaacucaugcaagcccucaacuucaacuccgaaaccgucccccaaaaauccucccucgaagaacccgacuucuacaaaaccaaaaucaaacuuugcauccuccuccacgcauuccgcauccgcgccgucaccaucgaccgugucaugagcuaccuaaacgccuccuga

SEQ ID NO: 136 - RNA, 657 nt, Artificial Sequence
  IL12A(1-219) CDS mRNA opt10
augugccccgcccguucacuccuccucgucgccacccucguccuccuagaccaccucucccuggcccgcaaccucccagucgccacccccgaccccggcauguuccccugccuccaccacucccaaaaccuccuccgcgccgucuccaacaugcuccaaaaagcccgccaaacccucgaauuuuaccccugcaccuccgaagagaucgaccacgaagacaucaccaaagacaaaaccuccacagucgaagccugccucccccucgaacucaccaaaaacgaauccugccuuaacucccgcgaaaccuccuucaucaccaacggcuccugccucgccucccgcaaaaccuccuucaugauggcccucugccucuccuccaucuacgaagaccucaaaauguaccaagucgaauuuaaaaccaugaacgccaaacuccucauggaccccaaacgccaaaucuuccucgaccaaaacaugcucgccgucaucgacgaacucaugcaagcccucaacuucaacuccgaaaccgucccccaaaaauccucccucgaagaacccgacuucuacaaaaccaaaaucaaacuuugcauccuccuccacgcauuccgcauccgcgccgucaccaucgaccgugucaugagcuaccuaaacgccucc

SEQ ID NO: 137 - RNA, 594 nt, Artificial Sequence
  IL12A(23-219) CDS mRNA opt10
cgcaaccucccagucgccacccccgaccccggcauguuccccugccuccaccacucccaaaaccuccuccgcgccgucuccaacaugcuccaaaaagcccgccaaacccucgaauuuuaccccugcaccuccgaagagaucgaccacgaagacaucaccaaagacaaaaccuccacagucgaagccugccucccccucgaacucaccaaaaacgaauccugccuuaacucccgcgaaaccuccuucaucaccaacggcuccugccucgccucccgcaaaaccuccuucaugauggcccucugccucuccuccaucuacgaagaccucaaaauguaccaagucgaauuuaaaaccaugaacgccaaacuccucauggaccccaaacgccaaaucuuccucgaccaaaacaugcucgccgucaucgacgaacucaugcaagcccucaacuucaacuccgaaaccgucccccaaaaauccucccucgaagaacccgacuucuacaaaaccaaaaucaaacuuugcauccuccuccacgcauuccgcauccgcgccgucaccaucgaccgugucaugagcuaccuaaacgccuccuga

SEQ ID NO: 138 - RNA, 987 nt, Artificial Sequence
  IL12B CDS mRNA opt10
augugccaccaacaacucgucaucuccugguucucccucgucuuccuagccuccccacucgucgccaucugggaacucaaaaaagacguauacgucgucgaacucgacugguaccccgacgccccaggagaaauggucguccuaaccugcgacacacccgaagaagacgguaucaccuggacccucgaccaauccuccgaaguccuaggcuccggcaagacccucaccauccaagucaaagaauuuggcgacgcaggacaauacaccugucacaaaggcggcgaaguccucagccacagccuucuccuacuccauaaaaaagaagacggcaucugguccacugacauccucaaagaccaaaaagaacccaaaaauaaaaccuuccuccgcugcgaagccaaaaacuacuccggccgauucaccuguugguggcuaaccacaaucagcaccgaccucaccuucucagucaaauccucccgcggcucaucugacccccaaggcgucacaugcggcgccgccacccucuccgccgaacgcguccgcggcgacaacaaagaauacgaauacuccgucgaaugucaagaagacuccgccugccccgccgccgaagaaucacuccccaucgaagucauggucgacgcaguccacaaacucaaauacgaaaacuacaccuccuccuucuucauccgcgacauaauaaaacccgacccacccaaaaaccuccaacucaagccacucaaaaacucccgacaagucgaagucuccugggaguaccccgacaccugguccacaccacacuccuacuucucccucaccuucugcguccaaguccaaggcaaauccaaacgcgaaaaaaaagaccgcguuuucacagacaaaaccuccgccacaguaauaugccgcaaaaacgccuccaucuccguccgggcccaagaccgcuacuacuccuccuccugguccgagugggccucaguccccugcagcuaa

SEQ ID NO: 139 - RNA, 984 nt, Artificial Sequence
  IL12B(1-328) CDS mRNA opt10
augugccaccaacaacucgucaucuccugguucucccucgucuuccuagccuccccacucgucgccaucugggaacucaaaaaagacguauacgucgucgaacucgacugguaccccgacgccccaggagaaauggucguccuaaccugcgacacacccgaagaagacgguaucaccuggacccucgaccaauccuccgaaguccuaggcuccggcaagacccucaccauccaagucaaagaauuuggcgacgcaggacaauacaccugucacaaaggcggcgaaguccucagccacagccuucuccuacuccauaaaaaagaagacggcaucugguccacugacauccucaaagaccaaaaagaacccaaaaauaaaaccuuccuccgcugcgaagccaaaaacuacuccggccgauucaccuguugguggcuaaccacaaucagcaccgaccucaccuucucagucaaauccucccgcggcucaucugacccccaaggcgucacaugcggcgccgccacccucuccgccgaacgcguccgcggcgacaacaaagaauacgaauacuccgucgaaugucaagaagacuccgccugccccgccgccgaagaaucacuccccaucgaagucauggucgacgcaguccacaaacucaaauacgaaaacuacaccuccuccuucuucauccgcgacauaauaaaacccgacccacccaaaaaccuccaacucaagccacucaaaaacucccgacaagucgaagucuccugggaguaccccgacaccugguccacaccacacuccuacuucucccucaccuucugcguccaaguccaaggcaaauccaaacgcgaaaaaaaagaccgcguuuucacagacaaaaccuccgccacaguaauaugccgcaaaaacgccuccaucuccguccgggcccaagaccgcuacuacuccuccuccugguccgagugggccucaguccccugcagc

SEQ ID NO: 140 - RNA, 921 nt, Artificial Sequence
  IL12B(23-328) CDS mRNA opt10
aucugggaacucaaaaaagacguauacgucgucgaacucgacugguaccccgacgccccaggagaaauggucguccuaaccugcgacacacccgaagaagacgguaucaccuggacccucgaccaauccuccgaaguccuaggcuccggcaagacccucaccauccaagucaaagaauuuggcgacgcaggacaauacaccugucacaaaggcggcgaaguccucagccacagccuucuccuacuccauaaaaaagaagacggcaucugguccacugacauccucaaagaccaaaaagaacccaaaaauaaaaccuuccuccgcugcgaagccaaaaacuacuccggccgauucaccuguugguggcuaaccacaaucagcaccgaccucaccuucucagucaaauccucccgcggcucaucugacccccaaggcgucacaugcggcgccgccacccucuccgccgaacgcguccgcggcgacaacaaagaauacgaauacuccgucgaaugucaagaagacuccgccugccccgccgccgaagaaucacuccccaucgaagucauggucgacgcaguccacaaacucaaauacgaaaacuacaccuccuccuucuucauccgcgacauaauaaaacccgacccacccaaaaaccuccaacucaagccacucaaaaacucccgacaagucgaagucuccugggaguaccccgacaccugguccacaccacacuccuacuucucccucaccuucugcguccaaguccaaggcaaauccaaacgcgaaaaaaaagaccgcguuuucacagacaaaaccuccgccacaguaauaugccgcaaaaacgccuccaucuccguccgggcccaagaccgcuacuacuccuccuccugguccgagugggccucaguccccugcagcuaa

SEQ ID NO: 141 - RNA, 54 nt, Artificial Sequence; identical to SEQ ID NO: 130
  Linker-sFvCC49-218 CDS mRNA opt10

SEQ ID NO: 142 - RNA, 1632 nt, Artificial Sequence
  IL12 CDS mRNA opt10
augugccaccaacaacucgucaucuccugguucucccucgucuuccuagccuccccacucgucgccaucugggaacucaaaaaagacguauacgucgucgaacucgacugguaccccgacgccccaggagaaauggucguccuaaccugcgacacacccgaagaagacgguaucaccuggacccucgaccaauccuccgaaguccuaggcuccggcaagacccucaccauccaagucaaagaauuuggcgacgcaggacaauacaccugucacaaaggcggcgaaguccucagccacagccuucuccuacuccauaaaaaagaagacggcaucugguccacugacauccucaaagaccaaaaagaacccaaaaauaaaaccuuccuccgcugcgaagccaaaaacuacuccggccgauucaccuguugguggcuaaccacaaucagcaccgaccucaccuucucagucaaauccucccgcggcucaucugacccccaaggcgucacaugcggcgccgccacccucuccgccgaacgcguccgcggcgacaacaaagaauacgaauacuccgucgaaugucaagaagacuccgccugccccgccgccgaagaaucacuccccaucgaagucauggucgacgcaguccacaaacucaaauacgaaaacuacaccuccuccuucuucauccgcgacauaauaaaacccgacccacccaaaaaccuccaacucaagccacucaaaaacucccgacaagucgaagucuccugggaguaccccgacaccugguccacaccacacuccuacuucucccucaccuucugcguccaaguccaaggcaaauccaaacgcgaaaaaaaagaccgcguuuucacagacaaaaccuccgccacaguaauaugccgcaaaaacgccuccaucuccguccgggcccaagaccgcuacuacuccuccuccugguccgagugggccucaguccccugcagcgggaguacgagugggagugggaagccggggaguggggaggggaguacgaaggggcgcaaccucccagucgccacccccgaccccggcauguuccccugccuccaccacucccaaaaccuccuccgcgccgucuccaacaugcuccaaaaagcccgccaaacccucgaauuuuaccccugcaccuccgaagagaucgaccacgaagacaucaccaaagacaaaaccuccacagucgaagccugccucccccucgaacucaccaaaaacgaauccugccuuaacucccgcgaaaccuccuucaucaccaacggcuccugccucgccucccgcaaaaccuccuucaugauggcccucugccucuccuccaucuacgaagaccucaaaauguaccaagucgaauuuaaaaccaugaacgccaaacuccucauggaccccaaacgccaaaucuuccucgaccaaaacaugcucgccgucaucgacgaacucaugcaagcccucaacuucaacuccgaaaccgucccccaaaaauccucccucgaagaacccgacuucuacaaaaccaaaaucaaacuuugcauccuccuccacgcauuccgcauccgcgccgucaccaucgaccgugucaugagcuaccuaaacgccuccuga

SEQ ID NO: 143 - RNA, 786 nt, Artificial Sequence
  CD40LG CDS mRNA opt10
augaucgaaaccuacaaucaaaccuccccccgcagcgccgcaacaggccuccccaucuccaugaaaaucuucauguaccuccucaccgucuuccuaaucacccaaaugaucggcuccgcccuauucgccgucuaccuccaccgccgccucgacaaaaucgaagacgaacgcaaccuccacgaagacuuugucuucaugaaaacuauccaacgaugcaacaccggcgaacgaucccuaucccuccucaacugcgaagaaauaaaaucccaauucgaaggauucgucaaagacaucaugcuaaacaaagaagaaaccaaaaaagaaaacuccuucgaaaugcaaaaaggcgaccaaaacccccaaaucgcagcccacgucaucucagaagcaucuuccaaaaccaccuccguccuccaaugggccgaaaaaggcuacuacaccaugucaaacaaccucgucacccucgaaaacggcaaacaacucaccgucaaacgccaaggccucuacuacaucuacgcacaagucaccuucugcuccaaccgcgaagcauccucccaagcccccuucaucgccucccucugccucaaaucccccggccgcuucgaacgcauccuccuccgcgccgcaaauacccacuccuccgccaaaccaugcggccaacaauccauccaccucggcggcgucuucgaacuccaacccggcgccuccgucuucgucaacgucaccgaccccucccaaguaucccauggaaccggcuucaccuccuucggccuccucaaacucuag

SEQ ID NO: 144 - RNA, 1084 nt, Artificial Sequence
  PDCD1 mRNA product wild type
gggagaaagcuuaccaugcagaucccacaggcgcccuggccagucgucugggcggugcuacaacugggcuggcggccaggaugguucuuagacuccccagacaggcccuggaacccccccaccuucuccccagcccugcucguggugaccgaaggggacaacgccaccuucaccugcagcuucuccaacacaucggagagcuucgugcuaaacugguaccgcaugagccccagcaaccagacggacaagcuggccgcuuuccccgaggaccgcagccagcccggccaggacugccgcuuccgugucacacaacugcccaacgggcgugacuuccacaugagcguggucagggcccggcgcaaugacagcggcaccuaccucuguggggccaucucccuggcccccaaggcgcagaucaaagagagccugcgggcagagcucagggugacagagagaagggcagaagugcccacagcccaccccagccccucacccaggccagccggccaguuccaaacccuggugguuggugucgugggcggccugcugggcagccuggugcugcuagucuggguccuggccgucaucugcucccgggccgcacgagggacaauaggagccaggcgcaccggccagccccugaaggaggaccccucagccgugccuguguucucuguggacuauggggagcuggauuuccaguggcgagagaagaccccggagccccccgugcccugugucccugagcagacggaguaugccaccauugucuuuccuagcggaaugggcaccucaucccccgcccgcaggggcucagccgacggcccucggagugcccagccacugaggccugaggauggacacugcucuuggccccucugaggacuaguuauaagacugacuagcccgaugggccucccaacgggcccuccuccccuccuugcaccgagauuaauaaaaaaaaaaaaaaaaaaaaaaaaaaaaaaaaaaaaaaaaaaaaaaaaaaaaaaaaaaaaaaaaugcaucccccccccccccccccccccccccccccccaaaggcucuuuucagagccaccagaauu

SEQ ID NO: 145 - RNA, 667 nt, Artificial Sequence
  PDCD1(1-149) mRNA product wild type
gggagaaagcuuaccaugcagaucccacaggcgcccuggccagucgucugggcggugcuacaacugggcuggcggccaggaugguucuuagacuccccagacaggcccuggaacccccccaccuucuccccagcccugcucguggugaccgaaggggacaacgccaccuucaccugcagcuucuccaacacaucggagagcuucgugcuaaacugguaccgcaugagccccagcaaccagacggacaagcuggccgcuuuccccgaggaccgcagccagcccggccaggacugccgcuuccgugucacacaacugcccaacgggcgugacuuccacaugagcguggucagggcccggcgcaaugacagcggcaccuaccucuguggggccaucucccuggcccccaaggcgcagaucaaagagagccugcgggcagagcucagggugacagagagaagggcaugaggacuaguuauaagacugacuagcccgaugggccucccaacgggcccuccuccccuccuugcaccgagauuaauaaaaaaaaaaaaaaaaaaaaaaaaaaaaaaaaaaaaaaaaaaaaaaaaaaaaaaaaaaaaaaaaugcaucccccccccccccccccccccccccccccccaaaggcucuuuucagagccaccagaauu

SEQ ID NO: 146 - RNA, 877 nt, Artificial Sequence
  IL12A mRNA product wild type
gggagaaagcuuaccauguguccagcgcgcagccuccuccuuguggcuacccugguccuccuggaccaccucaguuuggccagaaaccuccccguggccacuccagacccaggaauguucccaugccuucaccacucccaaaaccugcugagggccgucagcaacaugcuccagaaggccagacaaacucuagaauuuuacccuugcacuucugaagagauugaucaugaagauaucacaaaagauaaaaccagcacaguggaggccuguuuaccauuggaauuaaccaagaaugagaguugccuaaauuccagagagaccucuuucauaacuaaugggaguugccuggccuccagaaagaccucuuuuaugauggcccugugccuuaguaguauuuaugaagacuugaagauguaccagguggaguucaagaccaugaaugcaaagcuucugauggauccuaagaggcagaucuuucuagaucaaaacaugcuggcaguuauugaugagcugaugcaggcccugaauuucaacagugagacugugccacaaaaauccucccuugaagaaccggauuuuuauaaaacuaaaaucaagcucugcauacuucuucaugcuuucagaauucgggcagugacuauugauagagugaugagcuaucugaaugcuuccuaaggacuaguuauaagacugacuagcccgaugggccucccaacgggcccuccuccccuccuugcaccgagauuaauaaaaaaaaaaaaaaaaaaaaaaaaaaaaaaaaaaaaaaaaaaaaaaaaaaaaaaaaaaaaaaaaugcaucccccccccccccccccccccccccccccccaaaggcucuuuucagagccaccagaauu

SEQ ID NO: 147 - RNA, 874 nt, Artificial Sequence
  IL12A(1-219) mRNA product wild type
gggagaaagcuuaccauguguccagcgcgcagccuccuccuuguggcuacccugguccuccuggaccaccucaguuuggccagaaaccuccccguggccacuccagacccaggaauguucccaugccuucaccacucccaaaaccugcugagggccgucagcaacaugcuccagaaggccagacaaacucuagaauuuuacccuugcacuucugaagagauugaucaugaagauaucacaaaagauaaaaccagcacaguggaggccuguuuaccauuggaauuaaccaagaaugagaguugccuaaauuccagagagaccucuuucauaacuaaugggaguugccuggccuccagaaagaccucuuuuaugauggcccugugccuuaguaguauuuaugaagacuugaagauguaccagguggaguucaagaccaugaaugcaaagcuucugauggauccuaagaggcagaucuuucuagaucaaaacaugcuggcaguuauugaugagcugaugcaggcccugaauuucaacagugagacugugccacaaaaauccucccuugaagaaccggauuuuuauaaaacuaaaaucaagcucugcauacuucuucaugcuuucagaauucgggcagugacuauugauagagugaugagcuaucugaaugcuuccggacuaguuauaagacugacuagcccgaugggccucccaacgggcccuccuccccuccuugcaccgagauuaauaaaaaaaaaaaaaaaaaaaaaaaaaaaaaaaaaaaaaaaaaaaaaaaaaaaaaaaaaaaaaaaaugcaucccccccccccccccccccccccccccccccaaaggcucuuuucagagccaccagaauu

SEQ ID NO: 148 - RNA, 811 nt, Artificial Sequence
  IL12A(23-219) mRNA product wild type
gggagaaagcuuaccagaaaccuccccguggccacuccagacccaggaauguucccaugccuucaccacucccaaaaccugcugagggccgucagcaacaugcuccagaaggccagacaaacucuagaauuuuacccuugcacuucugaagagauugaucaugaagauaucacaaaagauaaaaccagcacaguggaggccuguuuaccauuggaauuaaccaagaaugagaguugccuaaauuccagagagaccucuuucauaacuaaugggaguugccuggccuccagaaagaccucuuuuaugauggcccugugccuuaguaguauuuaugaagacuugaagauguaccagguggaguucaagaccaugaaugcaaagcuucugauggauccuaagaggcagaucuuucuagaucaaaacaugcuggcaguuauugaugagcugaugcaggcccugaauuucaacagugagacugugccacaaaaauccucccuugaagaaccggauuuuuauaaaacuaaaaucaagcucugcauacuucuucaugcuuucagaauucgggcagugacuauugauagagugaugagcuaucugaaugcuuccuaaggacuaguuauaagacugacuagcccgaugggccucccaacgggcccuccuccccuccuugcaccgagauuaauaaaaaaaaaaaaaaaaaaaaaaaaaaaaaaaaaaaaaaaaaaaaaaaaaaaaaaaaaaaaaaaaugcaucccccccccccccccccccccccccccccccaaaggcucuuuucagagccaccagaauu

SEQ ID NO: 149 - RNA, 1204 nt, Artificial Sequence
  IL12B mRNA product wild type
gggagaaagcuuaccaugugucaccagcaguuggucaucucuugguuuucccugguuuuucuggcaucuccccucguggccauaugggaacugaagaaagauguuuaugucguagaauuggauugguauccggaugccccuggagaaauggugguccucaccugugacaccccugaagaagaugguaucaccuggaccuuggaccagagcagugaggucuuaggcucuggcaaaacccugaccauccaagucaaagaguuuggagaugcuggccaguacaccugucacaaaggaggcgagguucuaagccauucgcuccugcugcuucacaaaaaggaagauggaauuugguccacugauauuuuaaaggaccagaaagaacccaaaaauaagaccuuucuaagaugcgaggccaagaauuauucuggacguuucaccugcugguggcugacgacaaucaguacugauuugacauucagugucaaaagcagcagaggcucuucugacccccaaggggugacgugcggagcugcuacacucucugcagagagagucagaggggacaacaaggaguaugaguacucaguggagugccaggaggacagugccugcccagcugcugaggagagucugcccauugaggucaugguggaugccguucacaagcucaaguaugaaaacuacaccagcagcuucuucaucagggacaucaucaaaccugacccacccaagaacuugcagcugaagccauuaaagaauucucggcagguggaggucagcugggaguacccugacaccuggaguacuccacauuccuacuucucccugacauucugcguucagguccagggcaagagcaagagagaaaagaaagauagagucuucacggacaagaccucagccacggucaucugccgcaaaaaugccagcauuagcgugcgggcccaggaccgcuacuauagcucaucuuggagcgaaugggcaucugugcccugcaguuagggacuaguuauaagacugacuagcccgaugggccucccaacgggcccuccuccccuccuugcaccgagauuaauaaaaaaaaaaaaaaaaaaaaaaaaaaaaaaaaaaaaaaaaaaaaaaaaaaaaaaaaaaaaaaaaugcaucccccccccccccccccccccccccccccccaaaggcucuuuucagagccaccagaauu

SEQ ID NO: 150 - RNA, 1201 nt, Artificial Sequence
  IL12B(1-328) mRNA product wild type
gggagaaagcuuaccaugugucaccagcaguuggucaucucuugguuuucccugguuuuucuggcaucuccccucguggccauaugggaacugaagaaagauguuuaugucguagaauuggauugguauccggaugccccuggagaaauggugguccucaccugugacaccccugaagaagaugguaucaccuggaccuuggaccagagcagugaggucuuaggcucuggcaaaacccugaccauccaagucaaagaguuuggagaugcuggccaguacaccugucacaaaggaggcgagguucuaagccauucgcuccugcugcuucacaaaaaggaagauggaauuugguccacugauauuuuaaaggaccagaaagaacccaaaaauaagaccuuucuaagaugcgaggccaagaauuauucuggacguuucaccugcugguggcugacgacaaucaguacugauuugacauucagugucaaaagcagcagaggcucuucugacccccaaggggugacgugcggagcugcuacacucucugcagagagagucagaggggacaacaaggaguaugaguacucaguggagugccaggaggacagugccugcccagcugcugaggagagucugcccauugaggucaugguggaugccguucacaagcucaaguaugaaaacuacaccagcagcuucuucaucagggacaucaucaaaccugacccacccaagaacuugcagcugaagccauuaaagaauucucggcagguggaggucagcugggaguacccugacaccuggaguacuccacauuccuacuucucccugacauucugcguucagguccagggcaagagcaagagagaaaagaaagauagagucuucacggacaagaccucagccacggucaucugccgcaaaaaugccagcauuagcgugcgggcccaggaccgcuacuauagcucaucuuggagcgaaugggcaucugugcccugcaguggacuaguuauaagacugacuagcccgaugggccucccaacgggcccuccuccccuccuugcaccgagauuaauaaaaaaaaaaaaaaaaaaaaaaaaaaaaaaaaaaaaaaaaaaaaaaaaaaaaaaaaaaaaaaaaugcaucccccccccccccccccccccccccccccccaaaggcucuuuucagagccaccagaauu

SEQ ID NO: 151 - RNA, 1138 nt, Artificial Sequence
  IL12B(23-328) mRNA product wild type
gggagaaagcuuaccauaugggaacugaagaaagauguuuaugucguagaauuggauugguauccggaugccccuggagaaauggugguccucaccugugacaccccugaagaagaugguaucaccuggaccuuggaccagagcagugaggucuuaggcucuggcaaaacccugaccauccaagucaaagaguuuggagaugcuggccaguacaccugucacaaaggaggcgagguucuaagccauucgcuccugcugcuucacaaaaaggaagauggaauuugguccacugauauuuuaaaggaccagaaagaacccaaaaauaagaccuuucuaagaugcgaggccaagaauuauucuggacguuucaccugcugguggcugacgacaaucaguacugauuugacauucagugucaaaagcagcagaggcucuucugacccccaaggggugacgugcggagcugcuacacucucugcagagagagucagaggggacaacaaggaguaugaguacucaguggagugccaggaggacagugccugcccagcugcugaggagagucugcccauugaggucaugguggaugccguucacaagcucaaguaugaaaacuacaccagcagcuucuucaucagggacaucaucaaaccugacccacccaagaacuugcagcugaagccauuaaagaauucucggcagguggaggucagcugggaguacccugacaccuggaguacuccacauuccuacuucucccugacauucugcguucagguccagggcaagagcaagagagaaaagaaagauagagucuucacggacaagaccucagccacggucaucugccgcaaaaaugccagcauuagcgugcgggcccaggaccgcuacuauagcucaucuuggagcgaaugggcaucugugcccugcaguuagggacuaguuauaagacugacuagcccgaugggccucccaacgggcccuccuccccuccuugcaccgagauuaauaaaaaaaaaaaaaaaaaaaaaaaaaaaaaaaaaaaaaaaaaaaaaaaaaaaaaaaaaaaaaaaaugcaucccccccccccccccccccccccccccccccaaaggcucuuuucagagccaccagaauu

SEQ ID NO: 152 - RNA, 271 nt, Artificial Sequence
  Linker-sFvCC49-218 mRNA product wild type
gggagaaagcuuaccggcaguacuucgggcagugguaagccugguaguggugaggguaguacuaaggguggacuaguuauaagacugacuagcccgaugggccucccaacgggcccuccuccccuccuugcaccgagauuaauaaaaaaaaaaaaaaaaaaaaaaaaaaaaaaaaaaaaaaaaaaaaaaaaaaaaaaaaaaaaaaaaugcaucccccccccccccccccccccccccccccccaaaggcucuuuucagagccaccagaauu

SEQ ID NO: 153 - RNA, 1849 nt, Artificial Sequence
  IL12 mRNA product wild type
gggagaaagcuuaccaugugucaccagcaguuggucaucucuugguuuucccugguuuuucuggcaucuccccucguggccauaugggaacugaagaaagauguuuaugucguagaauuggauugguauccggaugccccuggagaaauggugguccucaccugugacaccccugaagaagaugguaucaccuggaccuuggaccagagcagugaggucuuaggcucuggcaaaacccugaccauccaagucaaagaguuuggagaugcuggccaguacaccugucacaaaggaggcgagguucuaagccauucgcuccugcugcuucacaaaaaggaagauggaauuugguccacugauauuuuaaaggaccagaaagaacccaaaaauaagaccuuucuaagaugcgaggccaagaauuauucuggacguuucaccugcugguggcugacgacaaucaguacugauuugacauucagugucaaaagcagcagaggcucuucugacccccaaggggugacgugcggagcugcuacacucucugcagagagagucagaggggacaacaaggaguaugaguacucaguggagugccaggaggacagugccugcccagcugcugaggagagucugcccauugaggucaugguggaugccguucacaagcucaaguaugaaaacuacaccagcagcuucuucaucagggacaucaucaaaccugacccacccaagaacuugcagcugaagccauuaaagaauucucggcagguggaggucagcugggaguacccugacaccuggaguacuccacauuccuacuucucccugacauucugcguucagguccagggcaagagcaagagagaaaagaaagauagagucuucacggacaagaccucagccacggucaucugccgcaaaaaugccagcauuagcgugcgggcccaggaccgcuacuauagcucaucuuggagcgaaugggcaucugugcccugcaguggcaguacuucgggcagugguaagccugguaguggugaggguaguacuaaggguagaaaccuccccguggccacuccagacccaggaauguucccaugccuucaccacucccaaaaccugcugagggccgucagcaacaugcuccagaaggccagacaaacucuagaauuuuacccuugcacuucugaagagauugaucaugaagauaucacaaaagauaaaaccagcacaguggaggccuguuuaccauuggaauuaaccaagaaugagaguugccuaaauuccagagagaccucuuucauaacuaaugggaguugccuggccuccagaaagaccucuuuuaugauggcccugugccuuaguaguauuuaugaagacuugaagauguaccagguggaguucaagaccaugaaugcaaagcuucugauggauccuaagaggcagaucuuucuagaucaaaacaugcuggcaguuauugaugagcugaugcaggcccugaauuucaacagugagacugugccacaaaaauccucccuugaagaaccggauuuuuauaaaacuaaaaucaagcucugcauacuucuucaugcuuucagaauucgggcagugacuauugauagagugaugagcuaucugaaugcuuccuaaggacuaguuauaagacugacuagcccgaugggccucccaacgggcccuccuccccuccuugcaccgagauuaauaaaaaaaaaaaaaaaaaaaaaaaaaaaaaaaaaaaaaaaaaaaaaaaaaaaaaaaaaaaaaaaaugcaucccccccccccccccccccccccccccccccaaaggcucuuuucagagccaccagaauu

SEQ ID NO: 154 - RNA, 1003 nt, Artificial Sequence
  CD40LG mRNA product wild type
gggagaaagcuuaccaugaucgaaacauacaaccaaacuucuccccgaucugcggccacuggacugcccaucagcaugaaaauuuuuauguauuuacuuacuguuuuucuuaucacccagaugauugggucagcacuuuuugcuguguaucuucauagaagguuggacaagauagaagaugaaaggaaucuucaugaagauuuuguauucaugaaaacgauacagagaugcaacacaggagaaagauccuuauccuuacugaacugugaggagauuaaaagccaguuugaaggcuuugugaaggauauaauguuaaacaaagaggagacgaagaaagaaaacagcuuugaaaugcaaaaaggugaucagaauccucaaauugcggcacaugucauaagugaggccagcaguaaaacaacaucuguguuacagugggcugaaaaaggauacuacaccaugagcaacaacuugguaacccuggaaaaugggaaacagcugaccguuaaaagacaaggacucuauuauaucuaugcccaagucaccuucuguuccaaucgggaagcuucgagucaagcuccauuuauagccagccucugccuaaagucccccgguagauucgagagaaucuuacucagagcugcaaauacccacaguuccgccaaaccuugcgggcaacaauccauucacuugggaggaguauuugaauugcaaccaggugcuucgguguuugucaaugugacugauccaagccaagugagccauggcacuggcuucacguccuuuggcuuacucaaacucugaggacuaguuauaagacugacuagcccgaugggccucccaacgggcccuccuccccuccuugcaccgagauuaauaaaaaaaaaaaaaaaaaaaaaaaaaaaaaaaaaaaaaaaaaaaaaaaaaaaaaaaaaaaaaaaaugcaucccccccccccccccccccccccccccccccaaaggcucuuuucagagccaccagaauu

SEQ ID NO: 155 - RNA, 1084 nt, Artificial Sequence
  PDCD1 mRNA product opt1
gggagaaagcuuaccaugcagaucccccaggccccguggcccguggucugggccgugcugcagcucggcuggcgccccgggugguuccuggacagccccgaccggccguggaacccgcccaccuucucccccgcgcugcucguggucaccgagggcgacaacgccacguucacgugcagcuucuccaacaccagcgaguccuucgugcugaacugguaccgcaugagccccuccaaccagaccgacaagcuggccgccuuccccgaggaccggagccagcccgggcaggacugccgcuuccgggugacccagcuccccaacggccgcgacuuccacauguccgucgugcgggcccgccggaacgacagcgggaccuaccugugcggcgcgaucucccuggccccgaaggcccagaucaaggagagccuccgcgccgagcugcgggugaccgagcgccgggcggagguccccaccgcccaccccucccccagcccgcgccccgccggccaguuccagacgcugguggugggggucgugggcgggcuccugggcucccuggugcuccuggucugggugcuggccgugaucugcagccgggccgcgcgcgggaccaucggcgcccggcgcaccggccagccccucaaggaggaccccuccgccgucccgguguucagcguggacuacggggagcuggacuuccaguggcgggagaagacccccgagccgcccguccccugcgugcccgagcagacggaguacgccaccaucguguuccccuccggcauggggaccagcagccccgcccgccggggcuccgcggacggcccgcgcagcgcccagccccugcgccccgaggacgggcacugcuccuggccgcucugaggacuaguuauaagacugacuagcccgaugggccucccaacgggcccuccuccccuccuugcaccgagauuaauaaaaaaaaaaaaaaaaaaaaaaaaaaaaaaaaaaaaaaaaaaaaaaaaaaaaaaaaaaaaaaaaugcaucccccccccccccccccccccccccccccccaaaggcucuuuucagagccaccagaauu

SEQ ID NO: 156 - RNA, 667 nt, Artificial Sequence
  PDCD1(1-149) mRNA product opt1
gggagaaagcuuaccaugcagaucccccaggccccguggcccguggucugggccgugcugcagcucggcuggcgccccgggugguuccuggacagccccgaccggccguggaacccgcccaccuucucccccgcgcugcucguggucaccgagggcgacaacgccacguucacgugcagcuucuccaacaccagcgaguccuucgugcugaacugguaccgcaugagccccuccaaccagaccgacaagcuggccgccuuccccgaggaccggagccagcccgggcaggacugccgcuuccgggugacccagcuccccaacggccgcgacuuccacauguccgucgugcgggcccgccggaacgacagcgggaccuaccugugcggcgcgaucucccuggccccgaaggcccagaucaaggagagccuccgcgccgagcugcgggugaccgagcgccgggcgugaggacuaguuauaagacugacuagcccgaugggccucccaacgggcccuccuccccuccuugcaccgagauuaauaaaaaaaaaaaaaaaaaaaaaaaaaaaaaaaaaaaaaaaaaaaaaaaaaaaaaaaaaaaaaaaaugcaucccccccccccccccccccccccccccccccaaaggcucuuuucagagccaccagaauu

SEQ ID NO: 157 - RNA, 877 nt, Artificial Sequence
  IL12A mRNA product opt1
gggagaaagcuuaccaugugccccgcccgcagccugcuccugguggccacccugguccuccuggaccaccugucccucgcgcggaaccugccgguggccacccccgaccccggcauguuccccugccugcaccacagccagaaccuccugcgcgccguguccaacaugcugcagaaggcccggcagacgcucgaguucuacccgugcaccagcgaggagaucgaccacgaggacaucaccaaggacaagaccuccacggucgaggccugccugccccuggagcucaccaagaacgagagcugccugaacucccgcgagaccagcuucaucaccaacggguccugccuggcgagccggaagacguccuucaugauggcccucugccugagcuccaucuacgaggaccugaagauguaccagguggaguucaagaccaugaacgccaagcuccugauggaccccaagcgccagaucuuccuggaccagaacaugcucgccgugaucgacgagcugaugcaggcgcugaacuucaacagcgagaccgucccccagaaguccagccucgaggagccggacuucuacaagaccaagaucaagcugugcauccugcuccacgccuuccggauccgcgccgugacgaucgaccgggugauguccuaccugaacgccagcugaggacuaguuauaagacugacuagcccgaugggccucccaacgggcccuccuccccuccuugcaccgagauuaauaaaaaaaaaaaaaaaaaaaaaaaaaaaaaaaaaaaaaaaaaaaaaaaaaaaaaaaaaaaaaaaaugcaucccccccccccccccccccccccccccccccaaaggcucuuuucagagccaccagaauu

SEQ ID NO: 158 - RNA, 874 nt, Artificial Sequence
  IL12A(1-219) mRNA product opt1
gggagaaagcuuaccaugugccccgcccgcagccugcuccugguggccacccugguccuccuggaccaccugucccucgcgcggaaccugccgguggccacccccgaccccggcauguuccccugccugcaccacagccagaaccuccugcgcgccguguccaacaugcugcagaaggcccggcagacgcucgaguucuacccgugcaccagcgaggagaucgaccacgaggacaucaccaaggacaagaccuccacggucgaggccugccugccccuggagcucaccaagaacgagagcugccugaacucccgcgagaccagcuucaucaccaacggguccugccuggcgagccggaagacguccuucaugauggcccucugccugagcuccaucuacgaggaccugaagauguaccagguggaguucaagaccaugaacgccaagcuccugauggaccccaagcgccagaucuuccuggaccagaacaugcucgccgugaucgacgagcugaugcaggcgcugaacuucaacagcgagaccgucccccagaaguccagccucgaggagccggacuucuacaagaccaagaucaagcugugcauccugcuccacgccuuccggauccgcgccgugacgaucgaccgggugauguccuaccugaacgccagcggacuaguuauaagacugacuagcccgaugggccucccaacgggcccuccuccccuccuugcaccgagauuaauaaaaaaaaaaaaaaaaaaaaaaaaaaaaaaaaaaaaaaaaaaaaaaaaaaaaaaaaaaaaaaaaugcaucccccccccccccccccccccccccccccccaaaggcucuuuucagagccaccagaauu

SEQ ID NO: 159 - RNA, 811 nt, Artificial Sequence
  IL12A(23-219) mRNA product opt1
gggagaaagcuuacccggaaccugccgguggccacccccgaccccggcauguuccccugccugcaccacagccagaaccuccugcgcgccguguccaacaugcugcagaaggcccggcagacgcucgaguucuacccgugcaccagcgaggagaucgaccacgaggacaucaccaaggacaagaccuccacggucgaggccugccugccccuggagcucaccaagaacgagagcugccugaacucccgcgagaccagcuucaucaccaacggguccugccuggcgagccggaagacguccuucaugauggcccucugccugagcuccaucuacgaggaccugaagauguaccagguggaguucaagaccaugaacgccaagcuccugauggaccccaagcgccagaucuuccuggaccagaacaugcucgccgugaucgacgagcugaugcaggcgcugaacuucaacagcgagaccgucccccagaaguccagccucgaggagccggacuucuacaagaccaagaucaagcugugcauccugcuccacgccuuccggauccgcgccgugacgaucgaccgggugauguccuaccugaacgccagcugaggacuaguuauaagacugacuagcccgaugggccucccaacgggcccuccuccccuccuugcaccgagauuaauaaaaaaaaaaaaaaaaaaaaaaaaaaaaaaaaaaaaaaaaaaaaaaaaaaaaaaaaaaaaaaaaugcaucccccccccccccccccccccccccccccccaaaggcucuuuucagagccaccagaauu

SEQ ID NO: 160 - RNA, 1204 nt, Artificial Sequence
  IL12B mRNA product opt1
gggagaaagcuuaccaugugccaccagcagcuggugaucagcugguucucccucgucuuccuggccagcccccugguggccaucugggagcucaagaaggacguguacgucguggagcuggacugguacccggacgcgcccggcgagauggugguccugaccugcgacacccccgaggaggacgggaucacguggacccucgaccaguccagcgaggugcugggcuccgggaagacccugaccauccaggugaaggaguucggcgacgccgggcaguacacgugccacaagggcggcgagguccucagccacucccugcugcuccugcacaagaaggaggacgggaucuggagcaccgacauccugaaggaccagaaggagcccaagaacaagaccuuccuccgcugcgaggccaagaacuacuccggccgguucacgugcugguggcugaccaccaucagcaccgaccugaccuucuccgucaagagcucccgcgggagcuccgacccgcagggcgugacgugcggggccgccacccucagcgcggagcgggugcgcggcgacaacaaggaguacgaguacuccguggagugccaggaggacagcgccugccccgccgccgaggagucccugcccaucgaggugauggucgacgcggugcacaagcugaaguacgagaacuacaccagcagcuucuucauccgggacaucaucaagcccgacccgcccaagaaccuccagcugaagccccugaagaacucccgccagguggaggucagcugggaguaccccgacaccugguccacgccgcacagcuacuucucccucaccuucugcguccaggugcagggcaagagcaagcgggagaagaaggaccgcguguucaccgacaagaccuccgccacggugaucugccggaagaacgccagcaucuccgugcgcgcccaggaccgguacuacagcuccagcugguccgagugggccagcguccccugcuccugaggacuaguuauaagacugacuagcccgaugggccucccaacgggcccuccuccccuccuugcaccgagauuaauaaaaaaaaaaaaaaaaaaaaaaaaaaaaaaaaaaaaaaaaaaaaaaaaaaaaaaaaaaaaaaaaugcaucccccccccccccccccccccccccccccccaaaggcucuuuucagagccaccagaauu

SEQ ID NO: 161 - RNA, 1201 nt, Artificial Sequence
  IL12B(1-328) mRNA product opt1
gggagaaagcuuaccaugugccaccagcagcuggugaucagcugguucucccucgucuuccuggccagcccccugguggccaucugggagcucaagaaggacguguacgucguggagcuggacugguacccggacgcgcccggcgagauggugguccugaccugcgacacccccgaggaggacgggaucacguggacccucgaccaguccagcgaggugcugggcuccgggaagacccugaccauccaggugaaggaguucggcgacgccgggcaguacacgugccacaagggcggcgagguccucagccacucccugcugcuccugcacaagaaggaggacgggaucuggagcaccgacauccugaaggaccagaaggagcccaagaacaagaccuuccuccgcugcgaggccaagaacuacuccggccgguucacgugcugguggcugaccaccaucagcaccgaccugaccuucuccgucaagagcucccgcgggagcuccgacccgcagggcgugacgugcggggccgccacccucagcgcggagcgggugcgcggcgacaacaaggaguacgaguacuccguggagugccaggaggacagcgccugccccgccgccgaggagucccugcccaucgaggugauggucgacgcggugcacaagcugaaguacgagaacuacaccagcagcuucuucauccgggacaucaucaagcccgacccgcccaagaaccuccagcugaagccccugaagaacucccgccagguggaggucagcugggaguaccccgacaccugguccacgccgcacagcuacuucucccucaccuucugcguccaggugcagggcaagagcaagcgggagaagaaggaccgcguguucaccgacaagaccuccgccacggugaucugccggaagaacgccagcaucuccgugcgcgcccaggaccgguacuacagcuccagcugguccgagugggccagcguccccugcuccggacuaguuauaagacugacuagcccgaugggccucccaacgggcccuccuccccuccuugcaccgagauuaauaaaaaaaaaaaaaaaaaaaaaaaaaaaaaaaaaaaaaaaaaaaaaaaaaaaaaaaaaaaaaaaaugcaucccccccccccccccccccccccccccccccaaaggcucuuuucagagccaccagaauu

SEQ ID NO: 162 - RNA, 1138 nt, Artificial Sequence
  IL12B(23-328) mRNA product opt1
gggagaaagcuuaccaucugggagcucaagaaggacguguacgucguggagcuggacugguacccggacgcgcccggcgagauggugguccugaccugcgacacccccgaggaggacgggaucacguggacccucgaccaguccagcgaggugcugggcuccgggaagacccugaccauccaggugaaggaguucggcgacgccgggcaguacacgugccacaagggcggcgagguccucagccacucccugcugcuccugcacaagaaggaggacgggaucuggagcaccgacauccugaaggaccagaaggagcccaagaacaagaccuuccuccgcugcgaggccaagaacuacuccggccgguucacgugcugguggcugaccaccaucagcaccgaccugaccuucuccgucaagagcucccgcgggagcuccgacccgcagggcgugacgugcggggccgccacccucagcgcggagcgggugcgcggcgacaacaaggaguacgaguacuccguggagugccaggaggacagcgccugccccgccgccgaggagucccugcccaucgaggugauggucgacgcggugcacaagcugaaguacgagaacuacaccagcagcuucuucauccgggacaucaucaagcccgacccgcccaagaaccuccagcugaagccccugaagaacucccgccagguggaggucagcugggaguaccccgacaccugguccacgccgcacagcuacuucucccucaccuucugcguccaggugcagggcaagagcaagcgggagaagaaggaccgcguguucaccgacaagaccuccgccacggugaucugccggaagaacgccagcaucuccgugcgcgcccaggaccgguacuacagcuccagcugguccgagugggccagcguccccugcuccugaggacuaguuauaagacugacuagcccgaugggccucccaacgggcccuccuccccuccuugcaccgagauuaauaaaaaaaaaaaaaaaaaaaaaaaaaaaaaaaaaaaaaaaaaaaaaaaaaaaaaaaaaaaaaaaaugcaucccccccccccccccccccccccccccccccaaaggcucuuuucagagccaccagaauu

SEQ ID NO: 163 - RNA, 271 nt, Artificial Sequence
  Linker-sFvCC49-218 mRNA product opt1
gggagaaagcuuaccggcagcaccuccgggagcggcaagcccggguccggcgaggggagcaccaagggcggacuaguuauaagacugacuagcccgaugggccucccaacgggcccuccuccccuccuugcaccgagauuaauaaaaaaaaaaaaaaaaaaaaaaaaaaaaaaaaaaaaaaaaaaaaaaaaaaaaaaaaaaaaaaaaugcaucccccccccccccccccccccccccccccccaaaggcucuuuucagagccaccagaauu

SEQ ID NO: 164 - RNA, 1849 nt, Artificial Sequence
  IL12 mRNA product opt1
gggagaaagcuuaccaugugccaccagcagcuggugaucagcugguucucccucgucuuccuggccagcccccugguggccaucugggagcucaagaaggacguguacgucguggagcuggacugguacccggacgcgcccggcgagauggugguccugaccugcgacacccccgaggaggacgggaucacguggacccucgaccaguccagcgaggugcugggcuccgggaagacccugaccauccaggugaaggaguucggcgacgccgggcaguacacgugccacaagggcggcgagguccucagccacucccugcugcuccugcacaagaaggaggacgggaucuggagcaccgacauccugaaggaccagaaggagcccaagaacaagaccuuccuccgcugcgaggccaagaacuacuccggccgguucacgugcugguggcugaccaccaucagcaccgaccugaccuucuccgucaagagcucccgcgggagcuccgacccgcagggcgugacgugcggggccgccacccucagcgcggagcgggugcgcggcgacaacaaggaguacgaguacuccguggagugccaggaggacagcgccugccccgccgccgaggagucccugcccaucgaggugauggucgacgcggugcacaagcugaaguacgagaacuacaccagcagcuucuucauccgggacaucaucaagcccgacccgcccaagaaccuccagcugaagccccugaagaacucccgccagguggaggucagcugggaguaccccgacaccugguccacgccgcacagcuacuucucccucaccuucugcguccaggugcagggcaagagcaagcgggagaagaaggaccgcguguucaccgacaagaccuccgccacggugaucugccggaagaacgccagcaucuccgugcgcgcccaggaccgguacuacagcuccagcugguccgagugggccagcguccccugcuccggcagcaccuccgggagcggcaagcccggguccggcgaggggagcaccaagggccggaaccugccgguggccacccccgaccccggcauguuccccugccugcaccacagccagaaccuccugcgcgccguguccaacaugcugcagaaggcccggcagacgcucgaguucuacccgugcaccagcgaggagaucgaccacgaggacaucaccaaggacaagaccuccacggucgaggccugccugccccuggagcucaccaagaacgagagcugccugaacucccgcgagaccagcuucaucaccaacggguccugccuggcgagccggaagacguccuucaugauggcccucugccugagcuccaucuacgaggaccugaagauguaccagguggaguucaagaccaugaacgccaagcuccugauggaccccaagcgccagaucuuccuggaccagaacaugcucgccgugaucgacgagcugaugcaggcgcugaacuucaacagcgagaccgucccccagaaguccagccucgaggagccggacuucuacaagaccaagaucaagcugugcauccugcuccacgccuuccggauccgcgccgugacgaucgaccgggugauguccuaccugaacgccagcugaggacuaguuauaagacugacuagcccgaugggccucccaacgggcccuccuccccuccuugcaccgagauuaauaaaaaaaaaaaaaaaaaaaaaaaaaaaaaaaaaaaaaaaaaaaaaaaaaaaaaaaaaaaaaaaaugcaucccccccccccccccccccccccccccccccaaaggcucuuuucagagccaccagaauu

SEQ ID NO: 165 - RNA, 1003 nt, Artificial Sequence
  CD40LG mRNA product opt1
gggagaaagcuuaccaugaucgagaccuacaaccagaccagcccccgcuccgccgccacgggccugccgaucagcaugaagaucuucauguaccuccugaccguguuccugaucacccagaugaucggguccgcgcuguucgccgucuaccugcaccggcgccuggacaagaucgaggacgagcggaaccuccacgaggacuucguguucaugaagaccauccagcgcugcaacacgggcgagcggagccugucccugcucaacugcgaggagaucaagagccaguucgagggguucgugaaggacaucaugcugaacaaggaggagaccaagaaggagaacuccuucgagaugcagaagggcgaccagaacccccagaucgccgcccacgucaucagcgaggccuccagcaagaccaccuccgugcugcagugggcggagaagggguacuacacgaugagcaacaaccucgugacccuggagaacggcaagcagcugaccgucaagcgccagggccucuacuacaucuacgcccaggugaccuucugcuccaaccgggaggccagcucccaggcccccuucaucgcgagccugugccugaagucccccgggcgcuucgagcggauccuccugcgcgccgccaacacgcacagcuccgccaagccgugcggccagcagagcauccaccucgggggcguguucgagcuccagcccggggccagcgucuucgugaacgugaccgaccccucccaggucagccacggcaccggcuucaccuccuucgggcugcugaagcucugaggacuaguuauaagacugacuagcccgaugggccucccaacgggcccuccuccccuccuugcaccgagauuaauaaaaaaaaaaaaaaaaaaaaaaaaaaaaaaaaaaaaaaaaaaaaaaaaaaaaaaaaaaaaaaaaugcaucccccccccccccccccccccccccccccccaaaggcucuuuucagagccaccagaauu

SEQ ID NO: 166 - RNA, 1084 nt, Artificial Sequence
  PDCD1 mRNA product opt2
gggagaaagcuuaccaugcagaucccccaggcccccuggcccgucgucugggccguccuccagcucggcuggcgccccggcugguuccucgacucccccgaccgccccuggaacccccccaccuucucccccgcccuccucgucgucaccgagggcgacaacgccaccuucaccuguuccuucuccaacaccuccgaguccuucguccucaacugguaccgcaugucccccuccaaccagaccgacaagcucgccgccuuccccgaggaccgcucccagcccggccaggacugccgcuuccgcgucacccagcuccccaacggccgcgacuuccacauguccgucguccgcgcccgccgcaacgacuccggcaccuaccucugcggcgccaucucccucgcccccaaggcccagaucaaggagucccuccgcgccgagcuccgcgucaccgagcgccgcgccgagguccccaccgcccaccccucccccuccccccgccccgccggccaguuccagacccucgucgucggcgucgucggcggccuccucggcucccucguccuccucgucuggguccucgccgucaucugcucccgcgccgcccgcggcaccaucggcgcccgccgcaccggccagccccucaaggaggaccccuccgccguccccgucuucuccgucgacuacggcgagcucgacuuccaguggcgcgagaagacccccgagccccccguccccugcguccccgagcagaccgaguacgccaccaucgucuuccccuccggcaugggcaccuccucccccgcccgccgcggcuccgccgacggcccccgcuccgcccagccccuccgccccgaggacggccacugcuccuggccccucugaggacuaguuauaagacugacuagcccgaugggccucccaacgggcccuccuccccuccuugcaccgagauuaauaaaaaaaaaaaaaaaaaaaaaaaaaaaaaaaaaaaaaaaaaaaaaaaaaaaaaaaaaaaaaaaaugcaucccccccccccccccccccccccccccccccaaaggcucuuuucagagccaccagaauu

SEQ ID NO: 167 - RNA, 667 nt, Artificial Sequence
  PDCD1(1-149) mRNA product opt2
gggagaaagcuuaccaugcagaucccccaggcccccuggcccgucgucugggccguccuccagcucggcuggcgccccggcugguuccucgacucccccgaccgccccuggaacccccccaccuucucccccgcccuccucgucgucaccgagggcgacaacgccaccuucaccuguuccuucuccaacaccuccgaguccuucguccucaacugguaccgcaugucccccuccaaccagaccgacaagcucgccgccuuccccgaggaccgcucccagcccggccaggacugccgcuuccgcgucacccagcuccccaacggccgcgacuuccacauguccgucguccgcgcccgccgcaacgacuccggcaccuaccucugcggcgccaucucccucgcccccaaggcccagaucaaggagucccuccgcgccgagcuccgcgucaccgagcgccgcgccugaggacuaguuauaagacugacuagcccgaugggccucccaacgggcccuccuccccuccuugcaccgagauuaauaaaaaaaaaaaaaaaaaaaaaaaaaaaaaaaaaaaaaaaaaaaaaaaaaaaaaaaaaaaaaaaaugcaucccccccccccccccccccccccccccccccaaaggcucuuuucagagccaccagaauu

SEQ ID NO: 168 - RNA, 877 nt, Artificial Sequence
  IL12A mRNA product opt2
gggagaaagcuuaccaugugccccgcccgcucccuccuccucgucgccacccucguccuccucgaccaccucucccucgcccgcaaccuccccgucgccacccccgaccccggcauguuccccugccuccaccacucccagaaccuccuccgcgccgucuccaacaugcuccagaaggcccgccagacccucgaguucuaccccugcaccuccgaggagaucgaccacgaggacaucaccaaggacaagaccuccaccgucgaggccugccucccccucgagcucaccaagaacgaguccugccucaacucccgcgagaccuccuucaucaccaacggcuccugccucgccucccgcaagaccuccuucaugauggcccucugccucuccuccaucuacgaggaccucaagauguaccaggucgaguucaagaccaugaacgccaagcuccucauggaccccaagcgccagaucuuccucgaccagaacaugcucgccgucaucgacgagcucaugcaggcccucaacuucaacuccgagaccgucccccagaaguccucccucgaggagcccgacuucuacaagaccaagaucaagcucugcauccuccuccacgccuuccgcauccgcgccgucaccaucgaccgcgucauguccuaccucaacgccuccugaggacuaguuauaagacugacuagcccgaugggccucccaacgggcccuccuccccuccuugcaccgagauuaauaaaaaaaaaaaaaaaaaaaaaaaaaaaaaaaaaaaaaaaaaaaaaaaaaaaaaaaaaaaaaaaaugcaucccccccccccccccccccccccccccccccaaaggcucuuuucagagccaccagaauu

SEQ ID NO: 169 - RNA, 874 nt, Artificial Sequence
  IL12A(1-219) mRNA product opt2
gggagaaagcuuaccaugugccccgcccgcucccuccuccucgucgccacccucguccuccucgaccaccucucccucgcccgcaaccuccccgucgccacccccgaccccggcauguuccccugccuccaccacucccagaaccuccuccgcgccgucuccaacaugcuccagaaggcccgccagacccucgaguucuaccccugcaccuccgaggagaucgaccacgaggacaucaccaaggacaagaccuccaccgucgaggccugccucccccucgagcucaccaagaacgaguccugccucaacucccgcgagaccuccuucaucaccaacggcuccugccucgccucccgcaagaccuccuucaugauggcccucugccucuccuccaucuacgaggaccucaagauguaccaggucgaguucaagaccaugaacgccaagcuccucauggaccccaagcgccagaucuuccucgaccagaacaugcucgccgucaucgacgagcucaugcaggcccucaacuucaacuccgagaccgucccccagaaguccucccucgaggagcccgacuucuacaagaccaagaucaagcucugcauccuccuccacgccuuccgcauccgcgccgucaccaucgaccgcgucauguccuaccucaacgccuccggacuaguuauaagacugacuagcccgaugggccucccaacgggcccuccuccccuccuugcaccgagauuaauaaaaaaaaaaaaaaaaaaaaaaaaaaaaaaaaaaaaaaaaaaaaaaaaaaaaaaaaaaaaaaaaugcaucccccccccccccccccccccccccccccccaaaggcucuuuucagagccaccagaauu

SEQ ID NO: 170 - RNA, 811 nt, Artificial Sequence
  IL12A(23-219) mRNA product opt2
gggagaaagcuuacccgcaaccuccccgucgccacccccgaccccggcauguuccccugccuccaccacucccagaaccuccuccgcgccgucuccaacaugcuccagaaggcccgccagacccucgaguucuaccccugcaccuccgaggagaucgaccacgaggacaucaccaaggacaagaccuccaccgucgaggccugccucccccucgagcucaccaagaacgaguccugccucaacucccgcgagaccuccuucaucaccaacggcuccugccucgccucccgcaagaccuccuucaugauggcccucugccucuccuccaucuacgaggaccucaagauguaccaggucgaguucaagaccaugaacgccaagcuccucauggaccccaagcgccagaucuuccucgaccagaacaugcucgccgucaucgacgagcucaugcaggcccucaacuucaacuccgagaccgucccccagaaguccucccucgaggagcccgacuucuacaagaccaagaucaagcucugcauccuccuccacgccuuccgcauccgcgccgucaccaucgaccgcgucauguccuaccucaacgccuccugaggacuaguuauaagacugacuagcccgaugggccucccaacgggcccuccuccccuccuugcaccgagauuaauaaaaaaaaaaaaaaaaaaaaaaaaaaaaaaaaaaaaaaaaaaaaaaaaaaaaaaaaaaaaaaaaugcaucccccccccccccccccccccccccccccccaaaggcucuuuucagagccaccagaauu

SEQ ID NO: 171 - RNA, 1204 nt, Artificial Sequence
  IL12B mRNA product opt2
gggagaaagcuuaccaugugccaccagcagcucgucaucuccugguucucccucgucuuccucgccuccccccucgucgccaucugggagcucaagaaggacgucuacgucgucgagcucgacugguaccccgacgcccccggcgagauggucguccucaccugugacacccccgaggaggacggcaucaccuggacccucgaccaguccuccgagguccucggcuccggcaagacccucaccauccaggucaaggaguucggcgacgccggccaguacaccugucacaagggcggcgagguccucucccacucccuccuccuccuccacaagaaggaggacggcaucugguccaccgacauccucaaggaccagaaggagcccaagaacaagaccuuccuccgcugcgaggccaagaacuacuccggccgcuucaccuguugguggcucaccaccaucuccaccgaccucaccuucuccgucaaguccucccgcggcuccuccgacccccagggcgucaccuguggcgccgccacccucuccgccgagcgcguccgcggcgacaacaaggaguacgaguacuccgucgagugccaggaggacuccgccugccccgccgccgaggagucccuccccaucgaggucauggucgacgccguccacaagcucaaguacgagaacuacaccuccuccuucuucauccgcgacaucaucaagcccgacccccccaagaaccuccagcucaagccccucaagaacucccgccaggucgaggucuccugggaguaccccgacaccugguccaccccccacuccuacuucucccucaccuucugcguccagguccagggcaaguccaagcgcgagaagaaggaccgcgucuucaccgacaagaccuccgccaccgucaucugccgcaagaacgccuccaucuccguccgcgcccaggaccgcuacuacuccuccuccugguccgagugggccuccguccccugcuccugaggacuaguuauaagacugacuagcccgaugggccucccaacgggcccuccuccccuccuugcaccgagauuaauaaaaaaaaaaaaaaaaaaaaaaaaaaaaaaaaaaaaaaaaaaaaaaaaaaaaaaaaaaaaaaaaugcaucccccccccccccccccccccccccccccccaaaggcucuuuucagagccaccagaauu

SEQ ID NO: 172 - RNA, 1201 nt, Artificial Sequence
  IL12B(1-328) mRNA product opt2
gggagaaagcuuaccaugugccaccagcagcucgucaucuccugguucucccucgucuuccucgccuccccccucgucgccaucugggagcucaagaaggacgucuacgucgucgagcucgacugguaccccgacgcccccggcgagauggucguccucaccugugacacccccgaggaggacggcaucaccuggacccucgaccaguccuccgagguccucggcuccggcaagacccucaccauccaggucaaggaguucggcgacgccggccaguacaccugucacaagggcggcgagguccucucccacucccuccuccuccuccacaagaaggaggacggcaucugguccaccgacauccucaaggaccagaaggagcccaagaacaagaccuuccuccgcugcgaggccaagaacuacuccggccgcuucaccuguugguggcucaccaccaucuccaccgaccucaccuucuccgucaaguccucccgcggcuccuccgacccccagggcgucaccuguggcgccgccacccucuccgccgagcgcguccgcggcgacaacaaggaguacgaguacuccgucgagugccaggaggacuccgccugccccgccgccgaggagucccuccccaucgaggucauggucgacgccguccacaagcucaaguacgagaacuacaccuccuccuucuucauccgcgacaucaucaagcccgacccccccaagaaccuccagcucaagccccucaagaacucccgccaggucgaggucuccugggaguaccccgacaccugguccaccccccacuccuacuucucccucaccuucugcguccagguccagggcaaguccaagcgcgagaagaaggaccgcgucuucaccgacaagaccuccgccaccgucaucugccgcaagaacgccuccaucuccguccgcgcccaggaccgcuacuacuccuccuccugguccgagugggccuccguccccugcuccggacuaguuauaagacugacuagcccgaugggccucccaacgggcccuccuccccuccuugcaccgagauuaauaaaaaaaaaaaaaaaaaaaaaaaaaaaaaaaaaaaaaaaaaaaaaaaaaaaaaaaaaaaaaaaaugcaucccccccccccccccccccccccccccccccaaaggcucuuuucagagccaccagaauu

SEQ ID NO: 173 - RNA, 1138 nt, Artificial Sequence
  IL12B(23-328) mRNA product opt2
gggagaaagcuuaccaucugggagcucaagaaggacgucuacgucgucgagcucgacugguaccccgacgcccccggcgagauggucguccucaccugugacacccccgaggaggacggcaucaccuggacccucgaccaguccuccgagguccucggcuccggcaagacccucaccauccaggucaaggaguucggcgacgccggccaguacaccugucacaagggcggcgagguccucucccacucccuccuccuccuccacaagaaggaggacggcaucugguccaccgacauccucaaggaccagaaggagcccaagaacaagaccuuccuccgcugcgaggccaagaacuacuccggccgcuucaccuguugguggcucaccaccaucuccaccgaccucaccuucuccgucaaguccucccgcggcuccuccgacccccagggcgucaccuguggcgccgccacccucuccgccgagcgcguccgcggcgacaacaaggaguacgaguacuccgucgagugccaggaggacuccgccugccccgccgccgaggagucccuccccaucgaggucauggucgacgccguccacaagcucaaguacgagaacuacaccuccuccuucuucauccgcgacaucaucaagcccgacccccccaagaaccuccagcucaagccccucaagaacucccgccaggucgaggucuccugggaguaccccgacaccugguccaccccccacuccuacuucucccucaccuucugcguccagguccagggcaaguccaagcgcgagaagaaggaccgcgucuucaccgacaagaccuccgccaccgucaucugccgcaagaacgccuccaucuccguccgcgcccaggaccgcuacuacuccuccuccugguccgagugggccuccguccccugcuccugaggacuaguuauaagacugacuagcccgaugggccucccaacgggcccuccuccccuccuugcaccgagauuaauaaaaaaaaaaaaaaaaaaaaaaaaaaaaaaaaaaaaaaaaaaaaaaaaaaaaaaaaaaaaaaaaugcaucccccccccccccccccccccccccccccccaaaggcucuuuucagagccaccagaauu

SEQ ID NO: 174 - RNA, 271 nt, Artificial Sequence
  Linker-sFvCC49-218 mRNA product opt2
gggagaaagcuuaccggcuccaccuccggcuccggcaagcccggcuccggcgagggcuccaccaagggcggacuaguuauaagacugacuagcccgaugggccucccaacgggcccuccuccccuccuugcaccgagauuaauaaaaaaaaaaaaaaaaaaaaaaaaaaaaaaaaaaaaaaaaaaaaaaaaaaaaaaaaaaaaaaaaugcaucccccccccccccccccccccccccccccccaaaggcucuuuucagagccaccagaauu

SEQ ID NO: 175 - RNA, 1849 nt, Artificial Sequence
  IL12 mRNA product opt2
gggagaaagcuuaccaugugccaccagcagcucgucaucuccugguucucccucgucuuccucgccuccccccucgucgccaucugggagcucaagaaggacgucuacgucgucgagcucgacugguaccccgacgcccccggcgagauggucguccucaccugugacacccccgaggaggacggcaucaccuggacccucgaccaguccuccgagguccucggcuccggcaagacccucaccauccaggucaaggaguucggcgacgccggccaguacaccugucacaagggcggcgagguccucucccacucccuccuccuccuccacaagaaggaggacggcaucugguccaccgacauccucaaggaccagaaggagcccaagaacaagaccuuccuccgcugcgaggccaagaacuacuccggccgcuucaccuguugguggcucaccaccaucuccaccgaccucaccuucuccgucaaguccucccgcggcuccuccgacccccagggcgucaccuguggcgccgccacccucuccgccgagcgcguccgcggcgacaacaaggaguacgaguacuccgucgagugccaggaggacuccgccugccccgccgccgaggagucccuccccaucgaggucauggucgacgccguccacaagcucaaguacgagaacuacaccuccuccuucuucauccgcgacaucaucaagcccgacccccccaagaaccuccagcucaagccccucaagaacucccgccaggucgaggucuccugggaguaccccgacaccugguccaccccccacuccuacuucucccucaccuucugcguccagguccagggcaaguccaagcgcgagaagaaggaccgcgucuucaccgacaagaccuccgccaccgucaucugccgcaagaacgccuccaucuccguccgcgcccaggaccgcuacuacuccuccuccugguccgagugggccuccguccccugcuccggcuccaccuccggcuccggcaagcccggcuccggcgagggcuccaccaagggccgcaaccuccccgucgccacccccgaccccggcauguuccccugccuccaccacucccagaaccuccuccgcgccgucuccaacaugcuccagaaggcccgccagacccucgaguucuaccccugcaccuccgaggagaucgaccacgaggacaucaccaaggacaagaccuccaccgucgaggccugccucccccucgagcucaccaagaacgaguccugccucaacucccgcgagaccuccuucaucaccaacggcuccugccucgccucccgcaagaccuccuucaugauggcccucugccucuccuccaucuacgaggaccucaagauguaccaggucgaguucaagaccaugaacgccaagcuccucauggaccccaagcgccagaucuuccucgaccagaacaugcucgccgucaucgacgagcucaugcaggcccucaacuucaacuccgagaccgucccccagaaguccucccucgaggagcccgacuucuacaagaccaagaucaagcucugcauccuccuccacgccuuccgcauccgcgccgucaccaucgaccgcgucauguccuaccucaacgccuccugaggacuaguuauaagacugacuagcccgaugggccucccaacgggcccuccuccccuccuugcaccgagauuaauaaaaaaaaaaaaaaaaaaaaaaaaaaaaaaaaaaaaaaaaaaaaaaaaaaaaaaaaaaaaaaaaugcaucccccccccccccccccccccccccccccccaaaggcucuuuucagagccaccagaauu

SEQ ID NO: 176 - RNA, 1003 nt, Artificial Sequence
  CD40LG mRNA product opt2
gggagaaagcuuaccaugaucgagaccuacaaccagaccuccccccgcuccgccgccaccggccuccccaucuccaugaagaucuucauguaccuccucaccgucuuccucaucacccagaugaucggcuccgcccucuucgccgucuaccuccaccgccgccucgacaagaucgaggacgagcgcaaccuccacgaggacuucgucuucaugaagaccauccagcgcugcaacaccggcgagcgcucccucucccuccucaacugcgaggagaucaagucccaguucgagggcuucgucaaggacaucaugcucaacaaggaggagaccaagaaggagaacuccuucgagaugcagaagggcgaccagaacccccagaucgccgcccacgucaucuccgaggccuccuccaagaccaccuccguccuccagugggccgagaagggcuacuacaccauguccaacaaccucgucacccucgagaacggcaagcagcucaccgucaagcgccagggccucuacuacaucuacgcccaggucaccuucugcuccaaccgcgaggccuccucccaggcccccuucaucgccucccucugccucaagucccccggccgcuucgagcgcauccuccuccgcgccgccaacacccacuccuccgccaagcccugcggccagcaguccauccaccucggcggcgucuucgagcuccagcccggcgccuccgucuucgucaacgucaccgaccccucccaggucucccacggcaccggcuucaccuccuucggccuccucaagcucugaggacuaguuauaagacugacuagcccgaugggccucccaacgggcccuccuccccuccuugcaccgagauuaauaaaaaaaaaaaaaaaaaaaaaaaaaaaaaaaaaaaaaaaaaaaaaaaaaaaaaaaaaaaaaaaaugcaucccccccccccccccccccccccccccccccaaaggcucuuuucagagccaccagaauu

SEQ ID NO: 177 - RNA, 1084 nt, Artificial Sequence
  PDCD1 mRNA product opt3
gggagaaagcuuaccaugcagaucccccaagccccuuggccaguggucugggcuguucugcagcucggcuggagaccggggugguuccuugacagccccgauaggccuuggaacccacccaccuuuuccccugcacuguuggugguaacagagggagacaaugccacuuucacgugcucuuuuucaaacaccagugagagcuucguguuaaauugguaccggauguccccaucuaaccagacagauaagcuggcggcuuuucccgaagaccgcucgcagccuggucaagauugucgauuccgugucacucagcuaccaaauggcagagacuuucacaugucagugguuagggcccggcgcaacgauagcgggaccuaucucugcggagcaauuagucuggccccgaaagcucagauaaaggaaucccuuagagcagagcugagggugacagaacggcgcgccgagguccccaccgcucauccuucuccaagcccccgaccugccggccaguuccaaacuuuggugguagguguugucgggggacuccugggcucccuggugcucuuagugugggugcuggcggucaucuguucaagagcagccaggggcacaauuggggcucggcguaccggacagccacuuaaagaggaccccagugccguuccgguguuuagcguagauuacggugaauuggacuuccaguggcgcgagaagacgccugaacccccagugccuugcguccccgagcagacugaguaugcaaccaucguguuuccaucuggcauggggacauccucacccgcuagaaggggaagcgccgauggcccucggagugcgcaaccacugcgaccggaagacggucacuguucuuggccccuaugaggacuaguuauaagacugacuagcccgaugggccucccaacgggcccuccuccccuccuugcaccgagauuaauaaaaaaaaaaaaaaaaaaaaaaaaaaaaaaaaaaaaaaaaaaaaaaaaaaaaaaaaaaaaaaaaugcaucccccccccccccccccccccccccccccccaaaggcucuuuucagagccaccagaauu

SEQ ID NO: 178 - RNA, 667 nt, Artificial Sequence
  PDCD1(1-149) mRNA product opt3
gggagaaagcuuaccaugcagaucccccaagccccuuggccaguggucugggcuguucugcagcucggcuggagaccggggugguuccuugacagccccgauaggccuuggaacccacccaccuuuuccccugcacuguuggugguaacagagggagacaaugccacuuucacgugcucuuuuucaaacaccagugagagcuucguguuaaauugguaccggauguccccaucuaaccagacagauaagcuggcggcuuuucccgaagaccgcucgcagccuggucaagauugucgauuccgugucacucagcuaccaaauggcagagacuuucacaugucagugguuagggcccggcgcaacgauagcgggaccuaucucugcggagcaauuagucuggccccgaaagcucagauaaaggaaucccuuagagcagagcugagggugacagaacggcgcgccugaggacuaguuauaagacugacuagcccgaugggccucccaacgggcccuccuccccuccuugcaccgagauuaauaaaaaaaaaaaaaaaaaaaaaaaaaaaaaaaaaaaaaaaaaaaaaaaaaaaaaaaaaaaaaaaaugcaucccccccccccccccccccccccccccccccaaaggcucuuuucagagccaccagaauu

SEQ ID NO: 179 - RNA, 877 nt, Artificial Sequence
  IL12A mRNA product opt3
gggagaaagcuuaccaugugccccgccagaagccugcuccuuguggcuacccuggucuuguuagaccaccugucccuagcaaggaaccucccuguugccacaccagauccgggcauguuccccugucugcaucacucucagaaucuucugcgggcggugucaaacauguugcaaaaggcucgccagacucucgaguuuuacccuugcacgagugaagagaucgaccaugaagauauuaccaaagacaagacaagcacuguagaggccugucugccacuggaacucaccaaaaaugaguccugcuuaaacucucgagagacaucguucauaaccaaugggucaugucuggcaagccguaagacaaguuuuaugauggcccuuugcuuguccucuaucuaugaagaucugaaaauguaccagguggaguucaagacuaugaacgcuaagcuacucauggaccccaaaagacagauuuuucuggaucaaaauaugcuugcagucaucgacgaacugaugcaggccuugaacuucaauagcgagaccgugccucagaaguccucacucgaggaaccagauuuuuauaaaacgaagauuaaacuguguaucuuacugcacgcuuucaggauacgggccguuacuaucgaccgcgugaugaguuaccucaacgcgagcugaggacuaguuauaagacugacuagcccgaugggccucccaacgggcccuccuccccuccuugcaccgagauuaauaaaaaaaaaaaaaaaaaaaaaaaaaaaaaaaaaaaaaaaaaaaaaaaaaaaaaaaaaaaaaaaaugcaucccccccccccccccccccccccccccccccaaaggcucuuuucagagccaccagaauu

SEQ ID NO: 180 - RNA, 874 nt, Artificial Sequence
  IL12A(1-219) mRNA product opt3
gggagaaagcuuaccaugugccccgccagaagccugcuccuuguggcuacccuggucuuguuagaccaccugucccuagcaaggaaccucccuguugccacaccagauccgggcauguuccccugucugcaucacucucagaaucuucugcgggcggugucaaacauguugcaaaaggcucgccagacucucgaguuuuacccuugcacgagugaagagaucgaccaugaagauauuaccaaagacaagacaagcacuguagaggccugucugccacuggaacucaccaaaaaugaguccugcuuaaacucucgagagacaucguucauaaccaaugggucaugucuggcaagccguaagacaaguuuuaugauggcccuuugcuuguccucuaucuaugaagaucugaaaauguaccagguggaguucaagacuaugaacgcuaagcuacucauggaccccaaaagacagauuuuucuggaucaaaauaugcuugcagucaucgacgaacugaugcaggccuugaacuucaauagcgagaccgugccucagaaguccucacucgaggaaccagauuuuuauaaaacgaagauuaaacuguguaucuuacugcacgcuuucaggauacgggccguuacuaucgaccgcgugaugaguuaccucaacgcgagcggacuaguuauaagacugacuagcccgaugggccucccaacgggcccuccuccccuccuugcaccgagauuaauaaaaaaaaaaaaaaaaaaaaaaaaaaaaaaaaaaaaaaaaaaaaaaaaaaaaaaaaaaaaaaaaugcaucccccccccccccccccccccccccccccccaaaggcucuuuucagagccaccagaauu

SEQ ID NO: 181 - RNA, 811 nt, Artificial Sequence
  IL12A(23-219) mRNA product opt3
gggagaaagcuuaccaggaaccucccuguugccacaccagauccgggcauguuccccugucugcaucacucucagaaucuucugcgggcggugucaaacauguugcaaaaggcucgccagacucucgaguuuuacccuugcacgagugaagagaucgaccaugaagauauuaccaaagacaagacaagcacuguagaggccugucugccacuggaacucaccaaaaaugaguccugcuuaaacucucgagagacaucguucauaaccaaugggucaugucuggcaagccguaagacaaguuuuaugauggcccuuugcuuguccucuaucuaugaagaucugaaaauguaccagguggaguucaagacuaugaacgcuaagcuacucauggaccccaaaagacagauuuuucuggaucaaaauaugcuugcagucaucgacgaacugaugcaggccuugaacuucaauagcgagaccgugccucagaaguccucacucgaggaaccagauuuuuauaaaacgaagauuaaacuguguaucuuacugcacgcuuucaggauacgggccguuacuaucgaccgcgugaugaguuaccucaacgcgagcugaggacuaguuauaagacugacuagcccgaugggccucccaacgggcccuccuccccuccuugcaccgagauuaauaaaaaaaaaaaaaaaaaaaaaaaaaaaaaaaaaaaaaaaaaaaaaaaaaaaaaaaaaaaaaaaaugcaucccccccccccccccccccccccccccccccaaaggcucuuuucagagccaccagaauu

SEQ ID NO: 182 - RNA, 1204 nt, Artificial Sequence
  IL12B mRNA product opt3
gggagaaagcuuaccaugugccaccagcaacuggugaucagcugguucucccucgucuuucuugccucuccccugguugcuauuugggaguugaagaaagacguguacguaguggaauuagauugguauccugacgcaccaggcgagauggucgugcugaccugugauacaccggaagaggacgggauaacuuggacgcuagaucagucaagugaaguucucggaagcgguaagacccugacaauccaggugaaagaguucggcgacgccgggcaguacacuugccauaagggaggcgagguccuuucccacucucuguugcuccugcauaaaaaggaagaugguauuuggucgaccgacauccugaaggaucaaaaagagcccaagaacaaaacauuucucagaugugaagcgaagaauuauucagggagguuuaccugcuggugguuaacuacaauuagcaccgaccugacguucagugugaaauccucucggggaagcuccgauccucagggcguaacuuguggcgcugccacccuuucagcagagcgcguucgaggggacaacaaggaguacgaauauaguguggagugccaggaagauagcgccuguccagcugcagaggaaucuuugcccaucgaggucaugguggacgccgugcacaagcugaaauacgagaauuauacauccucauucuuuauacgugacaucauuaagccugauccacccaaaaaccuacagcucaagccucugaaaaauagcagacaagucgaaguuaguugggaguacccagacacuuggucuaccccgcauuccuacuucagccuuacauuuugcgugcagguacagggaaagucgaaaagggaaaagaaggaucggguguucaccgacaaaacgucugcuacugucaucugucgcaagaacgccuccauuucagugagagcgcaggauagguauuacaguagcuccuggucugagugggcaagcguucccugcucaugaggacuaguuauaagacugacuagcccgaugggccucccaacgggcccuccuccccuccuugcaccgagauuaauaaaaaaaaaaaaaaaaaaaaaaaaaaaaaaaaaaaaaaaaaaaaaaaaaaaaaaaaaaaaaaaaugcaucccccccccccccccccccccccccccccccaaaggcucuuuucagagccaccagaauu

SEQ ID NO: 183 - RNA, 1201 nt, Artificial Sequence
  IL12B(1-328) mRNA product opt3
gggagaaagcuuaccaugugccaccagcaacuggugaucagcugguucucccucgucuuucuugccucuccccugguugcuauuugggaguugaagaaagacguguacguaguggaauuagauugguauccugacgcaccaggcgagauggucgugcugaccugugauacaccggaagaggacgggauaacuuggacgcuagaucagucaagugaaguucucggaagcgguaagacccugacaauccaggugaaagaguucggcgacgccgggcaguacacuugccauaagggaggcgagguccuuucccacucucuguugcuccugcauaaaaaggaagaugguauuuggucgaccgacauccugaaggaucaaaaagagcccaagaacaaaacauuucucagaugugaagcgaagaauuauucagggagguuuaccugcuggugguuaacuacaauuagcaccgaccugacguucagugugaaauccucucggggaagcuccgauccucagggcguaacuuguggcgcugccacccuuucagcagagcgcguucgaggggacaacaaggaguacgaauauaguguggagugccaggaagauagcgccuguccagcugcagaggaaucuuugcccaucgaggucaugguggacgccgugcacaagcugaaauacgagaauuauacauccucauucuuuauacgugacaucauuaagccugauccacccaaaaaccuacagcucaagccucugaaaaauagcagacaagucgaaguuaguugggaguacccagacacuuggucuaccccgcauuccuacuucagccuuacauuuugcgugcagguacagggaaagucgaaaagggaaaagaaggaucggguguucaccgacaaaacgucugcuacugucaucugucgcaagaacgccuccauuucagugagagcgcaggauagguauuacaguagcuccuggucugagugggcaagcguucccugcucaggacuaguuauaagacugacuagcccgaugggccucccaacgggcccuccuccccuccuugcaccgagauuaauaaaaaaaaaaaaaaaaaaaaaaaaaaaaaaaaaaaaaaaaaaaaaaaaaaaaaaaaaaaaaaaaugcaucccccccccccccccccccccccccccccccaaaggcucuuuucagagccaccagaauu

SEQ ID NO: 184 - RNA, 1138 nt, Artificial Sequence
  IL12B(23-328) mRNA product opt3
gggagaaagcuuaccauuugggaguugaagaaagacguguacguaguggaauuagauugguauccugacgcaccaggcgagauggucgugcugaccugugauacaccggaagaggacgggauaacuuggacgcuagaucagucaagugaaguucucggaagcgguaagacccugacaauccaggugaaagaguucggcgacgccgggcaguacacuugccauaagggaggcgagguccuuucccacucucuguugcuccugcauaaaaaggaagaugguauuuggucgaccgacauccugaaggaucaaaaagagcccaagaacaaaacauuucucagaugugaagcgaagaauuauucagggagguuuaccugcuggugguuaacuacaauuagcaccgaccugacguucagugugaaauccucucggggaagcuccgauccucagggcguaacuuguggcgcugccacccuuucagcagagcgcguucgaggggacaacaaggaguacgaauauaguguggagugccaggaagauagcgccuguccagcugcagaggaaucuuugcccaucgaggucaugguggacgccgugcacaagcugaaauacgagaauuauacauccucauucuuuauacgugacaucauuaagccugauccacccaaaaaccuacagcucaagccucugaaaaauagcagacaagucgaaguuaguugggaguacccagacacuuggucuaccccgcauuccuacuucagccuuacauuuugcgugcagguacagggaaagucgaaaagggaaaagaaggaucggguguucaccgacaaaacgucugcuacugucaucugucgcaagaacgccuccauuucagugagagcgcaggauagguauuacaguagcuccuggucugagugggcaagcguucccugcucaugaggacuaguuauaagacugacuagcccgaugggccucccaacgggcccuccuccccuccuugcaccgagauuaauaaaaaaaaaaaaaaaaaaaaaaaaaaaaaaaaaaaaaaaaaaaaaaaaaaaaaaaaaaaaaaaaugcaucccccccccccccccccccccccccccccccaaaggcucuuuucagagccaccagaauu

SEQ ID NO: 185 - RNA, 271 nt, Artificial Sequence
  Linker-sFvCC49-218 mRNA product opt3
gggagaaagcuuaccggcagcaccuccgggucuggaaagcccgguucaggcgaggggaguacaaaaggaggacuaguuauaagacugacuagcccgaugggccucccaacgggcccuccuccccuccuugcaccgagauuaauaaaaaaaaaaaaaaaaaaaaaaaaaaaaaaaaaaaaaaaaaaaaaaaaaaaaaaaaaaaaaaaaugcaucccccccccccccccccccccccccccccccaaaggcucuuuucagagccaccagaauu

SEQ ID NO: 186 - RNA, 1849 nt, Artificial Sequence
  IL12 mRNA product opt3
gggagaaagcuuaccaugugccaccagcaacuggugaucagcugguucucccucgucuuucuugccucuccccugguugcuauuugggaguugaagaaagacguguacguaguggaauuagauugguauccugacgcaccaggcgagauggucgugcugaccugugauacaccggaagaggacgggauaacuuggacgcuagaucagucaagugaaguucucggaagcgguaagacccugacaauccaggugaaagaguucggcgacgccgggcaguacacuugccauaagggaggcgagguccuuucccacucucuguugcuccugcauaaaaaggaagaugguauuuggucgaccgacauccugaaggaucaaaaagagcccaagaacaaaacauuucucagaugugaagcgaagaauuauucagggagguuuaccugcuggugguuaacuacaauuagcaccgaccugacguucagugugaaauccucucggggaagcuccgauccucagggcguaacuuguggcgcugccacccuuucagcagagcgcguucgaggggacaacaaggaguacgaauauaguguggagugccaggaagauagcgccuguccagcugcagaggaaucuuugcccaucgaggucaugguggacgccgugcacaagcugaaauacgagaauuauacauccucauucuuuauacgugacaucauuaagccugauccacccaaaaaccuacagcucaagccucugaaaaauagcagacaagucgaaguuaguugggaguacccagacacuuggucuaccccgcauuccuacuucagccuuacauuuugcgugcagguacagggaaagucgaaaagggaaaagaaggaucggguguucaccgacaaaacgucugcuacugucaucugucgcaagaacgccuccauuucagugagagcgcaggauagguauuacaguagcuccuggucugagugggcaagcguucccugcucaggcagcaccuccgggucuggaaagcccgguucaggcgaggggaguacaaaaggaaggaaccucccuguugccacaccagauccgggcauguuccccugucugcaucacucucagaaucuucugcgggcggugucaaacauguugcaaaaggcucgccagacucucgaguuuuacccuugcacgagugaagagaucgaccaugaagauauuaccaaagacaagacaagcacuguagaggccugucugccacuggaacucaccaaaaaugaguccugcuuaaacucucgagagacaucguucauaaccaaugggucaugucuggcaagccguaagacaaguuuuaugauggcccuuugcuuguccucuaucuaugaagaucugaaaauguaccagguggaguucaagacuaugaacgcuaagcuacucauggaccccaaaagacagauuuuucuggaucaaaauaugcuugcagucaucgacgaacugaugcaggccuugaacuucaauagcgagaccgugccucagaaguccucacucgaggaaccagauuuuuauaaaacgaagauuaaacuguguaucuuacugcacgcuuucaggauacgggccguuacuaucgaccgcgugaugaguuaccucaacgcgagcugaggacuaguuauaagacugacuagcccgaugggccucccaacgggcccuccuccccuccuugcaccgagauuaauaaaaaaaaaaaaaaaaaaaaaaaaaaaaaaaaaaaaaaaaaaaaaaaaaaaaaaaaaaaaaaaaugcaucccccccccccccccccccccccccccccccaaaggcucuuuucagagccaccagaauu

SEQ ID NO: 187 - RNA, 1003 nt, Artificial Sequence
  CD40LG mRNA product opt3
gggagaaagcuuaccaugaucgagaccuacaaccagacaagccccagauccgccgcuacuggccugccuauuucuaugaagauauucauguaucuccuuacgguguuucugaucacccaaaugauugggucagcauuguucgccgucuacuuacacaggcggcuggacaaaaucgaagaugagcgcaaucuacaugaagacuuuguuuucaugaagacaauucagcgaugcaacacuggagagcguagucucagccugcuuaauugugaagagaucaaaucccaguuugaggguuucgugaaggauauaaugcugaacaaagaagagaccaagaaggaaaauucuuuugagaugcagaaaggcgaccaaaacccacagaucgcggcucacguaauuucggaggccucaagcaagacaaccaguguguugcagugggcagaaaaaggguauuacacuauguccaauaaccucgucacacuggagaauggaaagcagcugaccgugaaaagacaaggccucuauuacaucuaugcccagguuacguucugcucuaacagggaagcuagcucccaggcaccguuuauugccucauuaugucugaagagucccggucgguucgagcgcauccuuuugagagcugccaauacucauagcucugcgaagccuugcgggcagcaauccauacaccugggaggcguguuugaacuacagccaggcgcaucagucuucgugaacguaaccgaucccagccagguuagucaugggacaggauuuacuucuuucggucuccugaaacuuugaggacuaguuauaagacugacuagcccgaugggccucccaacgggcccuccuccccuccuugcaccgagauuaauaaaaaaaaaaaaaaaaaaaaaaaaaaaaaaaaaaaaaaaaaaaaaaaaaaaaaaaaaaaaaaaaugcaucccccccccccccccccccccccccccccccaaaggcucuuuucagagccaccagaauu

SEQ ID NO: 188 - RNA, 1084 nt, Artificial Sequence
  PDCD1 mRNA product opt3v
gggagaaagcuuaccaugcagaucccucaggcuccuuggccuguugugugggcuguucugcaacuuggauggcggccuggcugguuccuggacucuccugacagacccuggaauccuccaacauucagccccgcucugcuggugguuaccgagggcgauaaugccaccuucaccuguagcuucagcaacaccagcgagagcuucgugcugaacugguacagaaugagccccagcaaccagaccgacaagcuggccgccuuuccugaggauagaucucagcccggccaggacugccgguucagaguuacacagcugcccaacggccgggacuuccacaugucugucguccgggccagaagaaacgacagcggcacauaucugugcggcgccauuucucuggccccuaaggcucagaucaaagagagccugagagccgagcugagagugacagaaagacgggccgaagugcccacagcucacccuucaccuucuccaagaccugccggccaguuccagacacuggucgugggaguuguuggcggacugcugggaucucuggugcugcuuguuugggugcucgccgugaucuguagcagagccgccagaggaacaaucggcgccagaaggacaggccagccucugaaagaggaucccucugcuguccccguguucagcguggacuauggcgagcuggauuuccaguggcgggaaaagacacccgagccuccagugccuugugugccugagcagacagaguacgccaccaucguguucccuagcggcaugggcacaucuagcccugccagaagaggaucugccgacggaccuagaucugcccagccucucagaccugaggauggccacuguagcuggccucuguaaggacuaguuauaagacugacuagcccgaugggccucccaacgggcccuccuccccuccuugcaccgagauuaauaaaaaaaaaaaaaaaaaaaaaaaaaaaaaaaaaaaaaaaaaaaaaaaaaaaaaaaaaaaaaaaaugcaucccccccccccccccccccccccccccccccaaaggcucuuuucagagccaccagaauu

SEQ ID NO: 189 - RNA, 667 nt, Artificial Sequence
  PDCD1(1-149) mRNA product opt3v
gggagaaagcuuaccaugcagaucccucaggcuccuuggccuguugugugggcuguucugcaacuuggauggcggccuggcugguuccuggacucuccugacagacccuggaauccuccaacauucagccccgcucugcuggugguuaccgagggcgauaaugccaccuucaccuguagcuucagcaacaccagcgagagcuucgugcugaacugguacagaaugagccccagcaaccagaccgacaagcuggccgccuuuccugaggauagaucucagcccggccaggacugccgguucagaguuacacagcugcccaacggccgggacuuccacaugucugucguccgggccagaagaaacgacagcggcacauaucugugcggcgccauuucucuggccccuaaggcucagaucaaagagagccugagagccgagcugagagugacagaaagacgggccugaggacuaguuauaagacugacuagcccgaugggccucccaacgggcccuccuccccuccuugcaccgagauuaauaaaaaaaaaaaaaaaaaaaaaaaaaaaaaaaaaaaaaaaaaaaaaaaaaaaaaaaaaaaaaaaaugcaucccccccccccccccccccccccccccccccaaaggcucuuuucagagccaccagaauu

SEQ ID NO: 190 - RNA, 877 nt, Artificial Sequence
  IL12A mRNA product opt3v
gggagaaagcuuaccaugugcccugccagaucucugcugcugguggcuacacuggugcugcuggaucaucugagccuggccagaaaccugccaguggccacgccugauccuggcauguuuccuugucugcaccacagccagaaccugcugagagccguguccaacaugcugcagaaggccagacagacccucgaguucuaccccugcaccagcgaggaaaucgaccacgaggacaucaccaaggacaagaccagcaccguggaagccugccugccucuggaacugaccaagaacgagagcugccugaacagccgggaaaccagcuucaucaccaacggcucuugccuggccuccagaaagaccuccuucaugauggcccugugccugagcagcaucuacgaggaccugaagauguaccaggucgaguucaagaccaugaacgccaagcugcugauggaccccaagcggcagaucuuccuggaccagaauaugcuggccgugaucgacgagcugaugcaggcccugaacuucaacagcgagacagugccccagaaguccagccuggaagaacccgacuucuacaagaccaagaucaagcugugcauccugcugcacgccuuccggaucagagccgugaccaucgacagagugaugagcuaccugaacgccuccugaggacuaguuauaagacugacuagcccgaugggccucccaacgggcccuccuccccuccuugcaccgagauuaauaaaaaaaaaaaaaaaaaaaaaaaaaaaaaaaaaaaaaaaaaaaaaaaaaaaaaaaaaaaaaaaaugcaucccccccccccccccccccccccccccccccaaaggcucuuuucagagccaccagaauu

SEQ ID NO: 191 - RNA, 874 nt, Artificial Sequence
  IL12A(1-219) mRNA product opt3v
gggagaaagcuuaccaugugcccugccagaucucugcugcugguggcuacacuggugcugcuggaucaucugagccuggccagaaaccugccaguggccacgccugauccuggcauguuuccuugucugcaccacagccagaaccugcugagagccguguccaacaugcugcagaaggccagacagacccucgaguucuaccccugcaccagcgaggaaaucgaccacgaggacaucaccaaggacaagaccagcaccguggaagccugccugccucuggaacugaccaagaacgagagcugccugaacagccgggaaaccagcuucaucaccaacggcucuugccuggccuccagaaagaccuccuucaugauggcccugugccugagcagcaucuacgaggaccugaagauguaccaggucgaguucaagaccaugaacgccaagcugcugauggaccccaagcggcagaucuuccuggaccagaauaugcuggccgugaucgacgagcugaugcaggcccugaacuucaacagcgagacagugccccagaaguccagccuggaagaacccgacuucuacaagaccaagaucaagcugugcauccugcugcacgccuuccggaucagagccgugaccaucgacagagugaugagcuaccugaacgccuccggacuaguuauaagacugacuagcccgaugggccucccaacgggcccuccuccccuccuugcaccgagauuaauaaaaaaaaaaaaaaaaaaaaaaaaaaaaaaaaaaaaaaaaaaaaaaaaaaaaaaaaaaaaaaaaugcaucccccccccccccccccccccccccccccccaaaggcucuuuucagagccaccagaauu

SEQ ID NO: 192 - RNA, 811 nt, Artificial Sequence
  IL12A(23-219) mRNA product opt3v
gggagaaagcuuaccagaaaccugccaguggccacgccugauccuggcauguuuccuugucugcaccacagccagaaccugcugagagccguguccaacaugcugcagaaggccagacagacccucgaguucuaccccugcaccagcgaggaaaucgaccacgaggacaucaccaaggacaagaccagcaccguggaagccugccugccucuggaacugaccaagaacgagagcugccugaacagccgggaaaccagcuucaucaccaacggcucuugccuggccuccagaaagaccuccuucaugauggcccugugccugagcagcaucuacgaggaccugaagauguaccaggucgaguucaagaccaugaacgccaagcugcugauggaccccaagcggcagaucuuccuggaccagaauaugcuggccgugaucgacgagcugaugcaggcccugaacuucaacagcgagacagugccccagaaguccagccuggaagaacccgacuucuacaagaccaagaucaagcugugcauccugcugcacgccuuccggaucagagccgugaccaucgacagagugaugagcuaccugaacgccuccugaggacuaguuauaagacugacuagcccgaugggccucccaacgggcccuccuccccuccuugcaccgagauuaauaaaaaaaaaaaaaaaaaaaaaaaaaaaaaaaaaaaaaaaaaaaaaaaaaaaaaaaaaaaaaaaaugcaucccccccccccccccccccccccccccccccaaaggcucuuuucagagccaccagaauu

SEQ ID NO: 193 - RNA, 1204 nt, Artificial Sequence
  IL12B mRNA product opt3v
gggagaaagcuuaccaugugucaccagcagcuggucaucagcugguucagccugguguuccuggccucuccucugguggccaucugggagcugaagaaagacguguacgugguggaacuggacugguaucccgaugcuccuggcgagaugguggugcugaccugcgauaccccugaagaggacggcaucaccuggacacuggaucagucuagcgaggugcucggcagcggcaagacccugaccauccaagugaaagaguuuggcgacgccggccaguacaccugucacaaaggcggagaagugcugagccacagccugcugcugcuccacaagaaagaggauggcauuuggagcaccgacauccugaaggaccagaaagagcccaagaacaagaccuuccugagaugcgaggccaagaacuacagcggccgguucacauguugguggcugaccaccaucagcaccgaccugaccuucagcgugaaguccagcagaggcagcagugauccucagggcguuacauguggcgccgcuacacugucugccgaaagagugcggggcgacaacaaagaauacgaguacagcguggaaugccaagaggacagcgccuguccagccgccgaagagucucugccuaucgaagugaugguggacgccgugcacaagcugaaguacgagaacuacaccuccagcuuuuucauccgggacaucaucaagcccgauccuccaaagaaccugcagcugaagccucugaagaacagcagacagguggaaguguccugggaguaccccgacaccuggucuacaccccacagcuacuucagccugaccuuuugcgugcaagugcagggcaaguccaagcgcgagaaaaaggaccggguguucaccgacaagaccagcgccaccgugaucugcagaaagaacgccagcaucagcgucagagcccaggaccgguacuacagcagcucuuggagcgaaugggccagcgugccauguagcuaaggacuaguuauaagacugacuagcccgaugggccucccaacgggcccuccuccccuccuugcaccgagauuaauaaaaaaaaaaaaaaaaaaaaaaaaaaaaaaaaaaaaaaaaaaaaaaaaaaaaaaaaaaaaaaaaugcaucccccccccccccccccccccccccccccccaaaggcucuuuucagagccaccagaauu

SEQ ID NO: 194 - RNA, 1201 nt, Artificial Sequence
  IL12B(1-328) mRNA product opt3v
gggagaaagcuuaccaugugucaccagcagcuggucaucagcugguucagccugguguuccuggccucuccucugguggccaucugggagcugaagaaagacguguacgugguggaacuggacugguaucccgaugcuccuggcgagaugguggugcugaccugcgauaccccugaagaggacggcaucaccuggacacuggaucagucuagcgaggugcucggcagcggcaagacccugaccauccaagugaaagaguuuggcgacgccggccaguacaccugucacaaaggcggagaagugcugagccacagccugcugcugcuccacaagaaagaggauggcauuuggagcaccgacauccugaaggaccagaaagagcccaagaacaagaccuuccugagaugcgaggccaagaacuacagcggccgguucacauguugguggcugaccaccaucagcaccgaccugaccuucagcgugaaguccagcagaggcagcagugauccucagggcguuacauguggcgccgcuacacugucugccgaaagagugcggggcgacaacaaagaauacgaguacagcguggaaugccaagaggacagcgccuguccagccgccgaagagucucugccuaucgaagugaugguggacgccgugcacaagcugaaguacgagaacuacaccuccagcuuuuucauccgggacaucaucaagcccgauccuccaaagaaccugcagcugaagccucugaagaacagcagacagguggaaguguccugggaguaccccgacaccuggucuacaccccacagcuacuucagccugaccuuuugcgugcaagugcagggcaaguccaagcgcgagaaaaaggaccggguguucaccgacaagaccagcgccaccgugaucugcagaaagaacgccagcaucagcgucagagcccaggaccgguacuacagcagcucuuggagcgaaugggccagcgugccauguagcggacuaguuauaagacugacuagcccgaugggccucccaacgggcccuccuccccuccuugcaccgagauuaauaaaaaaaaaaaaaaaaaaaaaaaaaaaaaaaaaaaaaaaaaaaaaaaaaaaaaaaaaaaaaaaaugcaucccccccccccccccccccccccccccccccaaaggcucuuuucagagccaccagaauu

SEQ ID NO: 195 - RNA, 1138 nt, Artificial Sequence
  IL12B(23-328) mRNA product opt3v
gggagaaagcuuaccaucugggagcugaagaaagacguguacgugguggaacuggacugguaucccgaugcuccuggcgagaugguggugcugaccugcgauaccccugaagaggacggcaucaccuggacacuggaucagucuagcgaggugcucggcagcggcaagacccugaccauccaagugaaagaguuuggcgacgccggccaguacaccugucacaaaggcggagaagugcugagccacagccugcugcugcuccacaagaaagaggauggcauuuggagcaccgacauccugaaggaccagaaagagcccaagaacaagaccuuccugagaugcgaggccaagaacuacagcggccgguucacauguugguggcugaccaccaucagcaccgaccugaccuucagcgugaaguccagcagaggcagcagugauccucagggcguuacauguggcgccgcuacacugucugccgaaagagugcggggcgacaacaaagaauacgaguacagcguggaaugccaagaggacagcgccuguccagccgccgaagagucucugccuaucgaagugaugguggacgccgugcacaagcugaaguacgagaacuacaccuccagcuuuuucauccgggacaucaucaagcccgauccuccaaagaaccugcagcugaagccucugaagaacagcagacagguggaaguguccugggaguaccccgacaccuggucuacaccccacagcuacuucagccugaccuuuugcgugcaagugcagggcaaguccaagcgcgagaaaaaggaccggguguucaccgacaagaccagcgccaccgugaucugcagaaagaacgccagcaucagcgucagagcccaggaccgguacuacagcagcucuuggagcgaaugggccagcgugccauguagcuaaggacuaguuauaagacugacuagcccgaugggccucccaacgggcccuccuccccuccuugcaccgagauuaauaaaaaaaaaaaaaaaaaaaaaaaaaaaaaaaaaaaaaaaaaaaaaaaaaaaaaaaaaaaaaaaaugcaucccccccccccccccccccccccccccccccaaaggcucuuuucagagccaccagaauu

SEQ ID NO: 196 - RNA, 271 nt, Artificial Sequence
  Linker-sFvCC49-218 mRNA product opt3v
gggagaaagcuuaccggcucuacaucuggcucuggcaaaccuggaucuggcgagggcucuacaaagggcggacuaguuauaagacugacuagcccgaugggccucccaacgggcccuccuccccuccuugcaccgagauuaauaaaaaaaaaaaaaaaaaaaaaaaaaaaaaaaaaaaaaaaaaaaaaaaaaaaaaaaaaaaaaaaaugcaucccccccccccccccccccccccccccccccaaaggcucuuuucagagccaccagaauu

SEQ ID NO: 197 - RNA, 1849 nt, Artificial Sequence
  IL12 mRNA product opt3v
gggagaaagcuuaccaugugucaccagcagcuggucaucagcugguucagccugguguuccuggccucuccucugguggccaucugggagcugaagaaagacguguacgugguggaacuggacugguaucccgaugcuccuggcgagaugguggugcugaccugcgauaccccugaagaggacggcaucaccuggacacuggaucagucuagcgaggugcucggcagcggcaagacccugaccauccaagugaaagaguuuggcgacgccggccaguacaccugucacaaaggcggagaagugcugagccacagccugcugcugcuccacaagaaagaggauggcauuuggagcaccgacauccugaaggaccagaaagagcccaagaacaagaccuuccugagaugcgaggccaagaacuacagcggccgguucacauguugguggcugaccaccaucagcaccgaccugaccuucagcgugaaguccagcagaggcagcagugauccucagggcguuacauguggcgccgcuacacugucugccgaaagagugcggggcgacaacaaagaauacgaguacagcguggaaugccaagaggacagcgccuguccagccgccgaagagucucugccuaucgaagugaugguggacgccgugcacaagcugaaguacgagaacuacaccuccagcuuuuucauccgggacaucaucaagcccgauccuccaaagaaccugcagcugaagccucugaagaacagcagacagguggaaguguccugggaguaccccgacaccuggucuacaccccacagcuacuucagccugaccuuuugcgugcaagugcagggcaaguccaagcgcgagaaaaaggaccggguguucaccgacaagaccagcgccaccgugaucugcagaaagaacgccagcaucagcgucagagcccaggaccgguacuacagcagcucuuggagcgaaugggccagcgugccauguagcggcucuacaucuggcucuggcaaaccuggaucuggcgagggcucuacaaagggcagaaaccugccaguggccacgccugauccuggcauguuuccuugucugcaccacagccagaaccugcugagagccguguccaacaugcugcagaaggccagacagacccucgaguucuaccccugcaccagcgaggaaaucgaccacgaggacaucaccaaggacaagaccagcaccguggaagccugccugccucuggaacugaccaagaacgagagcugccugaacagccgggaaaccagcuucaucaccaacggcucuugccuggccuccagaaagaccuccuucaugauggcccugugccugagcagcaucuacgaggaccugaagauguaccaggucgaguucaagaccaugaacgccaagcugcugauggaccccaagcggcagaucuuccuggaccagaauaugcuggccgugaucgacgagcugaugcaggcccugaacuucaacagcgagacagugccccagaaguccagccuggaagaacccgacuucuacaagaccaagaucaagcugugcauccugcugcacgccuuccggaucagagccgugaccaucgacagagugaugagcuaccugaacgccuccugaggacuaguuauaagacugacuagcccgaugggccucccaacgggcccuccuccccuccuugcaccgagauuaauaaaaaaaaaaaaaaaaaaaaaaaaaaaaaaaaaaaaaaaaaaaaaaaaaaaaaaaaaaaaaaaaugcaucccccccccccccccccccccccccccccccaaaggcucuuuucagagccaccagaauu

SEQ ID NO: 198 - RNA, 1003 nt, Artificial Sequence
  CD40LG mRNA product opt3v
gggagaaagcuuaccaugaucgagacauacaaccagacaagccccagaagcgccgccacaggacugccuaucagcaugaagaucuuuauguaccugcugaccguguuccugaucacccagaugaucggcagcgcccuguuugccguguaccugcacagacggcuggacaagaucgaggacgagagaaaccugcacgaggacuucguguucaugaagaccauccagcggugcaacaccggcgagagaagucugagccugcugaacugcgaggaaaucaagagccaguucgagggcuucgugaaggacaucaugcugaacaaagaggaaacgaagaaagaaaacuccuucgagaugcagaagggcgaccagaauccucagaucgccgcucacgugaucagcgaggccagcagcaagacaacaagcgugcugcagugggccgagaagggcuacuacaccaugagcaacaaccuggucacccuggaaaacggcaagcagcugacagugaagcggcagggccuguacuacaucuacgcccaagugaccuucugcagcaacagagaggccagcucucaggccccuuuuaucgccagccugugccugaaguccccuggcagauucgagcggauucugcugagagccgccaacacacacagcagcgccaaaccuuguggccagcagucuauucaccucggcggaguguuugagcugcagccuggcgcaagcguguucgugaaugugacagacccuagccaggugucccacggcaccggcuuuacaucuuucggacugcugaagcugugaggacuaguuauaagacugacuagcccgaugggccucccaacgggcccuccuccccuccuugcaccgagauuaauaaaaaaaaaaaaaaaaaaaaaaaaaaaaaaaaaaaaaaaaaaaaaaaaaaaaaaaaaaaaaaaaugcaucccccccccccccccccccccccccccccccaaaggcucuuuucagagccaccagaauu

SEQ ID NO: 199 - RNA, 1084 nt, Artificial Sequence
  PDCD1 mRNA product opt4
gggagaaagcuuaccaugcagaucccccaggcccccuggcccguggugugggccgugcugcagcugggcuggagacccggcugguuccuggacagccccgacagacccuggaacccccccaccuucagccccgcccugcugguggugaccgagggcgacaacgccaccuucaccuguagcuucagcaacaccagcgagagcuucgugcugaacugguacagaaugagccccagcaaccagaccgacaagcuggccgccuuccccgaggacagaagccagcccggccaggacugcagauucagagugacccagcugcccaacggcagagacuuccacaugagcguggugagagccagaagaaacgacagcggcaccuaccugugcggcgccaucagccuggcccccaaggcccagaucaaggagagccugagagccgagcugagagugaccgagagaagggccgaggugcccaccgcccaccccagccccagccccagacccgccggccaguuccagacccugguggugggcguggugggcggccugcugggcagccuggugcugcuggugugggugcuggccgugaucugcagcagagccgccagaggcaccaucggcgccagaagaaccggccagccccugaaggaggaccccagcgccgugcccguguucagcguggacuacggcgagcuggacuuccaguggagagagaagacccccgagccccccgugcccugcgugcccgagcagaccgaguacgccaccaucguguuccccagcggcaugggcaccagcagccccgccagaagaggcagcgccgacggccccagaagcgcccagccccugagacccgaggacggccacugcagcuggccccugugaggacuaguuauaagacugacuagcccgaugggccucccaacgggcccuccuccccuccuugcaccgagauuaauaaaaaaaaaaaaaaaaaaaaaaaaaaaaaaaaaaaaaaaaaaaaaaaaaaaaaaaaaaaaaaaaugcaucccccccccccccccccccccccccccccccaaaggcucuuuucagagccaccagaauu

SEQ ID NO: 200 - RNA, 667 nt, Artificial Sequence
  PDCD1(1-149) mRNA product opt4
gggagaaagcuuaccaugcagaucccccaggcccccuggcccguggugugggccgugcugcagcugggcuggagacccggcugguuccuggacagccccgacagacccuggaacccccccaccuucagccccgcccugcugguggugaccgagggcgacaacgccaccuucaccuguagcuucagcaacaccagcgagagcuucgugcugaacugguacagaaugagccccagcaaccagaccgacaagcuggccgccuuccccgaggacagaagccagcccggccaggacugcagauucagagugacccagcugcccaacggcagagacuuccacaugagcguggugagagccagaagaaacgacagcggcaccuaccugugcggcgccaucagccuggcccccaaggcccagaucaaggagagccugagagccgagcugagagugaccgagagaagggccugaggacuaguuauaagacugacuagcccgaugggccucccaacgggcccuccuccccuccuugcaccgagauuaauaaaaaaaaaaaaaaaaaaaaaaaaaaaaaaaaaaaaaaaaaaaaaaaaaaaaaaaaaaaaaaaaugcaucccccccccccccccccccccccccccccccaaaggcucuuuucagagccaccagaauu

SEQ ID NO: 201 - RNA, 877 nt, Artificial Sequence
  IL12A mRNA product opt4
gggagaaagcuuaccaugugccccgccagaagccugcugcugguggccacccuggugcugcuggaccaccugagccuggccagaaaccugcccguggccacccccgaccccggcauguuccccugccugcaccacagccagaaccugcugagagccgugagcaacaugcugcagaaggccagacagacccuggaguucuaccccugcaccagcgaggagaucgaccacgaggacaucaccaaggacaagaccagcaccguggaggccugccugccccuggagcugaccaagaacgagagcugccugaacagcagagagaccagcuucaucaccaacggcagcugccuggccagcagaaagaccagcuucaugauggcccugugccugagcagcaucuacgaggaccugaagauguaccagguggaguucaagaccaugaacgccaagcugcugauggaccccaagagacagaucuuccuggaccagaacaugcuggccgugaucgacgagcugaugcaggcccugaacuucaacagcgagaccgugccccagaagaguagccuggaggagcccgacuucuacaagaccaagaucaagcugugcauccugcugcacgccuucagaaucagagccgugaccaucgacagagugaugagcuaccugaacgccagcugaggacuaguuauaagacugacuagcccgaugggccucccaacgggcccuccuccccuccuugcaccgagauuaauaaaaaaaaaaaaaaaaaaaaaaaaaaaaaaaaaaaaaaaaaaaaaaaaaaaaaaaaaaaaaaaaugcaucccccccccccccccccccccccccccccccaaaggcucuuuucagagccaccagaauu

SEQ ID NO: 202 - RNA, 874 nt, Artificial Sequence
  IL12A(1-219) mRNA product opt4
gggagaaagcuuaccaugugccccgccagaagccugcugcugguggccacccuggugcugcuggaccaccugagccuggccagaaaccugcccguggccacccccgaccccggcauguuccccugccugcaccacagccagaaccugcugagagccgugagcaacaugcugcagaaggccagacagacccuggaguucuaccccugcaccagcgaggagaucgaccacgaggacaucaccaaggacaagaccagcaccguggaggccugccugccccuggagcugaccaagaacgagagcugccugaacagcagagagaccagcuucaucaccaacggcagcugccuggccagcagaaagaccagcuucaugauggcccugugccugagcagcaucuacgaggaccugaagauguaccagguggaguucaagaccaugaacgccaagcugcugauggaccccaagagacagaucuuccuggaccagaacaugcuggccgugaucgacgagcugaugcaggcccugaacuucaacagcgagaccgugccccagaagaguagccuggaggagcccgacuucuacaagaccaagaucaagcugugcauccugcugcacgccuucagaaucagagccgugaccaucgacagagugaugagcuaccugaacgccagcggacuaguuauaagacugacuagcccgaugggccucccaacgggcccuccuccccuccuugcaccgagauuaauaaaaaaaaaaaaaaaaaaaaaaaaaaaaaaaaaaaaaaaaaaaaaaaaaaaaaaaaaaaaaaaaugcaucccccccccccccccccccccccccccccccaaaggcucuuuucagagccaccagaauu

SEQ ID NO: 203 - RNA, 811 nt, Artificial Sequence
  IL12A(23-219) mRNA product opt4
gggagaaagcuuaccagaaaccugcccguggccacccccgaccccggcauguuccccugccugcaccacagccagaaccugcugagagccgugagcaacaugcugcagaaggccagacagacccuggaguucuaccccugcaccagcgaggagaucgaccacgaggacaucaccaaggacaagaccagcaccguggaggccugccugccccuggagcugaccaagaacgagagcugccugaacagcagagagaccagcuucaucaccaacggcagcugccuggccagcagaaagaccagcuucaugauggcccugugccugagcagcaucuacgaggaccugaagauguaccagguggaguucaagaccaugaacgccaagcugcugauggaccccaagagacagaucuuccuggaccagaacaugcuggccgugaucgacgagcugaugcaggcccugaacuucaacagcgagaccgugccccagaagaguagccuggaggagcccgacuucuacaagaccaagaucaagcugugcauccugcugcacgccuucagaaucagagccgugaccaucgacagagugaugagcuaccugaacgccagcugaggacuaguuauaagacugacuagcccgaugggccucccaacgggcccuccuccccuccuugcaccgagauuaauaaaaaaaaaaaaaaaaaaaaaaaaaaaaaaaaaaaaaaaaaaaaaaaaaaaaaaaaaaaaaaaaugcaucccccccccccccccccccccccccccccccaaaggcucuuuucagagccaccagaauu

SEQ ID NO: 204 - RNA, 1204 nt, Artificial Sequence
  IL12B mRNA product opt4
gggagaaagcuuaccaugugccaccagcagcuggugaucagcugguucagccugguguuccuggccagcccccugguggccaucugggagcugaagaaggacguguacgugguggagcuggacugguaccccgacgcccccggcgagaugguggugcugaccugcgacacccccgaggaggacggcaucaccuggacccuggaccagagcagcgaggugcugggcagcggcaagacccugaccauccaggugaaggaguucggcgacgccggccaguacaccugucacaagggcggcgaggugcugagccacagccugcugcugcugcacaagaaggaggacggcaucuggagcaccgacauccugaaggaccagaaggagcccaagaacaagaccuuccugagaugcgaggccaagaacuacagcggcagauucaccuguugguggcugaccaccaucagcaccgaccugaccuucagcgugaagaguagcagaggcagcagcgacccccagggcgugaccugcggcgccgccacccugagcgccgagagagugagaggcgacaacaaggaguacgaguacagcguggagugccaggaggacagcgccugccccgccgccgaggagagccugcccaucgaggugaugguggacgccgugcacaagcugaaguacgagaacuacaccagcagcuucuucaucagagacaucaucaagcccgacccccccaagaaccugcagcugaagccccugaagaacagcagacagguggaggugagcugggaguaccccgacaccuggagcaccccccacagcuacuucagccugaccuucugcgugcagguucagggcaagagcaagagagagaagaaggacagaguguucaccgacaagaccagcgccaccgugaucugcagaaagaacgccagcaucagcgugagagcccaggacagauacuacagcagcagcuggagcgagugggccagcgugcccugcagcugaggacuaguuauaagacugacuagcccgaugggccucccaacgggcccuccuccccuccuugcaccgagauuaauaaaaaaaaaaaaaaaaaaaaaaaaaaaaaaaaaaaaaaaaaaaaaaaaaaaaaaaaaaaaaaaaugcaucccccccccccccccccccccccccccccccaaaggcucuuuucagagccaccagaauu

SEQ ID NO: 205 - RNA, 1201 nt, Artificial Sequence
  IL12B(1-328) mRNA product opt4
gggagaaagcuuaccaugugccaccagcagcuggugaucagcugguucagccugguguuccuggccagcccccugguggccaucugggagcugaagaaggacguguacgugguggagcuggacugguaccccgacgcccccggcgagaugguggugcugaccugcgacacccccgaggaggacggcaucaccuggacccuggaccagagcagcgaggugcugggcagcggcaagacccugaccauccaggugaaggaguucggcgacgccggccaguacaccugucacaagggcggcgaggugcugagccacagccugcugcugcugcacaagaaggaggacggcaucuggagcaccgacauccugaaggaccagaaggagcccaagaacaagaccuuccugagaugcgaggccaagaacuacagcggcagauucaccuguugguggcugaccaccaucagcaccgaccugaccuucagcgugaagaguagcagaggcagcagcgacccccagggcgugaccugcggcgccgccacccugagcgccgagagagugagaggcgacaacaaggaguacgaguacagcguggagugccaggaggacagcgccugccccgccgccgaggagagccugcccaucgaggugaugguggacgccgugcacaagcugaaguacgagaacuacaccagcagcuucuucaucagagacaucaucaagcccgacccccccaagaaccugcagcugaagccccugaagaacagcagacagguggaggugagcugggaguaccccgacaccuggagcaccccccacagcuacuucagccugaccuucugcgugcagguucagggcaagagcaagagagagaagaaggacagaguguucaccgacaagaccagcgccaccgugaucugcagaaagaacgccagcaucagcgugagagcccaggacagauacuacagcagcagcuggagcgagugggccagcgugcccugcagcggacuaguuauaagacugacuagcccgaugggccucccaacgggcccuccuccccuccuugcaccgagauuaauaaaaaaaaaaaaaaaaaaaaaaaaaaaaaaaaaaaaaaaaaaaaaaaaaaaaaaaaaaaaaaaaugcaucccccccccccccccccccccccccccccccaaaggcucuuuucagagccaccagaauu

SEQ ID NO: 206 - RNA, 1138 nt, Artificial Sequence
  IL12B(23-328) mRNA product opt4
gggagaaagcuuaccaucugggagcugaagaaggacguguacgugguggagcuggacugguaccccgacgcccccggcgagaugguggugcugaccugcgacacccccgaggaggacggcaucaccuggacccuggaccagagcagcgaggugcugggcagcggcaagacccugaccauccaggugaaggaguucggcgacgccggccaguacaccugucacaagggcggcgaggugcugagccacagccugcugcugcugcacaagaaggaggacggcaucuggagcaccgacauccugaaggaccagaaggagcccaagaacaagaccuuccugagaugcgaggccaagaacuacagcggcagauucaccuguugguggcugaccaccaucagcaccgaccugaccuucagcgugaagaguagcagaggcagcagcgacccccagggcgugaccugcggcgccgccacccugagcgccgagagagugagaggcgacaacaaggaguacgaguacagcguggagugccaggaggacagcgccugccccgccgccgaggagagccugcccaucgaggugaugguggacgccgugcacaagcugaaguacgagaacuacaccagcagcuucuucaucagagacaucaucaagcccgacccccccaagaaccugcagcugaagccccugaagaacagcagacagguggaggugagcugggaguaccccgacaccuggagcaccccccacagcuacuucagccugaccuucugcgugcagguucagggcaagagcaagagagagaagaaggacagaguguucaccgacaagaccagcgccaccgugaucugcagaaagaacgccagcaucagcgugagagcccaggacagauacuacagcagcagcuggagcgagugggccagcgugcccugcagcugaggacuaguuauaagacugacuagcccgaugggccucccaacgggcccuccuccccuccuugcaccgagauuaauaaaaaaaaaaaaaaaaaaaaaaaaaaaaaaaaaaaaaaaaaaaaaaaaaaaaaaaaaaaaaaaaugcaucccccccccccccccccccccccccccccccaaaggcucuuuucagagccaccagaauu

SEQ ID NO: 207 - RNA, 271 nt, Artificial Sequence
  Linker-sFvCC49-218 mRNA product opt4
gggagaaagcuuaccggcagcaccagcggcagcggcaagcccggcagcggcgagggcagcaccaagggcggacuaguuauaagacugacuagcccgaugggccucccaacgggcccuccuccccuccuugcaccgagauuaauaaaaaaaaaaaaaaaaaaaaaaaaaaaaaaaaaaaaaaaaaaaaaaaaaaaaaaaaaaaaaaaaugcaucccccccccccccccccccccccccccccccaaaggcucuuuucagagccaccagaauu

SEQ ID NO: 208 - RNA, 1849 nt, Artificial Sequence
  IL12 mRNA product opt4
gggagaaagcuuaccaugugccaccagcagcuggugaucagcugguucagccugguguuccuggccagcccccugguggccaucugggagcugaagaaggacguguacgugguggagcuggacugguaccccgacgcccccggcgagaugguggugcugaccugcgacacccccgaggaggacggcaucaccuggacccuggaccagagcagcgaggugcugggcagcggcaagacccugaccauccaggugaaggaguucggcgacgccggccaguacaccugucacaagggcggcgaggugcugagccacagccugcugcugcugcacaagaaggaggacggcaucuggagcaccgacauccugaaggaccagaaggagcccaagaacaagaccuuccugagaugcgaggccaagaacuacagcggcagauucaccuguugguggcugaccaccaucagcaccgaccugaccuucagcgugaagaguagcagaggcagcagcgacccccagggcgugaccugcggcgccgccacccugagcgccgagagagugagaggcgacaacaaggaguacgaguacagcguggagugccaggaggacagcgccugccccgccgccgaggagagccugcccaucgaggugaugguggacgccgugcacaagcugaaguacgagaacuacaccagcagcuucuucaucagagacaucaucaagcccgacccccccaagaaccugcagcugaagccccugaagaacagcagacagguggaggugagcugggaguaccccgacaccuggagcaccccccacagcuacuucagccugaccuucugcgugcagguucagggcaagagcaagagagagaagaaggacagaguguucaccgacaagaccagcgccaccgugaucugcagaaagaacgccagcaucagcgugagagcccaggacagauacuacagcagcagcuggagcgagugggccagcgugcccugcagcggcagcaccagcggcagcggcaagcccggcagcggcgagggcagcaccaagggcagaaaccugcccguggccacccccgaccccggcauguuccccugccugcaccacagccagaaccugcugagagccgugagcaacaugcugcagaaggccagacagacccuggaguucuaccccugcaccagcgaggagaucgaccacgaggacaucaccaaggacaagaccagcaccguggaggccugccugccccuggagcugaccaagaacgagagcugccugaacagcagagagaccagcuucaucaccaacggcagcugccuggccagcagaaagaccagcuucaugauggcccugugccugagcagcaucuacgaggaccugaagauguaccagguggaguucaagaccaugaacgccaagcugcugauggaccccaagagacagaucuuccuggaccagaacaugcuggccgugaucgacgagcugaugcaggcccugaacuucaacagcgagaccgugccccagaagaguagccuggaggagcccgacuucuacaagaccaagaucaagcugugcauccugcugcacgccuucagaaucagagccgugaccaucgacagagugaugagcuaccugaacgccagcugaggacuaguuauaagacugacuagcccgaugggccucccaacgggcccuccuccccuccuugcaccgagauuaauaaaaaaaaaaaaaaaaaaaaaaaaaaaaaaaaaaaaaaaaaaaaaaaaaaaaaaaaaaaaaaaaugcaucccccccccccccccccccccccccccccccaaaggcucuuuucagagccaccagaauu

SEQ ID NO: 209 - RNA, 1003 nt, Artificial Sequence
  CD40LG mRNA product opt4
gggagaaagcuuaccaugaucgagaccuacaaccagaccagccccagaagcgccgccaccggccugcccaucagcaugaagaucuucauguaccugcugaccguguuccugaucacccagaugaucggcagcgcccuguucgccguguaccugcacagaagacuggacaagaucgaggacgagagaaaccugcacgaggacuucguguucaugaagaccauccagagaugcaacaccggcgagagaagccugagccugcugaacugcgaggagaucaagagccaguucgagggcuucgugaaggacaucaugcugaacaaggaggagaccaagaaggagaacagcuucgagaugcagaagggcgaccagaacccccagaucgccgcccacgugaucagcgaggccagcagcaagaccaccagcgugcugcagugggccgagaagggcuacuacaccaugagcaacaaccuggugacccuggagaacggcaagcagcugaccgugaagagacagggccuguacuacaucuacgcccaggugaccuucugcagcaacagagaggccagcagccaggcccccuucaucgccagccugugccugaagagucccggcagauucgagagaauccugcugagagccgccaacacccacagcagcgccaagcccugcggccagcagagcauccaccugggcggcguguucgagcugcagcccggcgccagcguguucgugaacgugaccgaccccagccaggugagccacggcaccggcuucaccagcuucggccugcugaagcugugaggacuaguuauaagacugacuagcccgaugggccucccaacgggcccuccuccccuccuugcaccgagauuaauaaaaaaaaaaaaaaaaaaaaaaaaaaaaaaaaaaaaaaaaaaaaaaaaaaaaaaaaaaaaaaaaugcaucccccccccccccccccccccccccccccccaaaggcucuuuucagagccaccagaauu

SEQ ID NO: 210 - RNA, 1084 nt, Artificial Sequence
  PDCD1 mRNA product opt5
gggagaaagcuuaccaugcagaucccccaagccccuuggccgguggucugggcuguucugcagcucggcuggagacccgggugguuccuggacagcccugaucggcccuggaacccucccaccuuuuccccugcccuucugguggugacagagggagacaaugcgacguuuaccugcucuuucagcaacacauccgaaucuuucguccucaauugguaccgcaugagcccguccaaccagaccgauaagcuggcugccuuucccgaggacagaucucagccuggccaagauugucgguuccgcgugacacagcuucccaaugggagagacuuucacaugagcguugugcgggcccgcagaaacgauuccggaaccuaucugugcggcgcuauuagccucgccccuaaagcucagaucaaggaaucucugcgggccgagcugcgcgucacagaaagacgggcggaggugcccaccgcccauccguccccuagcccccgcccugcugggcaguuccaaacgcucguugugggagucgugggcggccugcuugggucucuggugcuccuggucuggguucuugccgugauuuguuccagagcugcccggggaaccaucggcgcgcgcagaacagggcagccccugaaagaggaccccagcgccgugccugucuuuucuguggauuacggagaacucgacuuccaguggcgggagaagaccccggaacccccuguucccugcgugccugagcagacagaguaugcuaccauugucuuucccuccggcauggggacgagcuccccggccagacgcggaucugcugauggcccucggagcgcccaaccccugagaccugaagacggccacuguuccuggccccugugaggacuaguuauaagacugacuagcccgaugggccucccaacgggcccuccuccccuccuugcaccgagauuaauaaaaaaaaaaaaaaaaaaaaaaaaaaaaaaaaaaaaaaaaaaaaaaaaaaaaaaaaaaaaaaaaugcaucccccccccccccccccccccccccccccccaaaggcucuuuucagagccaccagaauu

SEQ ID NO: 211 - RNA, 667 nt, Artificial Sequence
  PDCD1(1-149) mRNA product opt5
gggagaaagcuuaccaugcagaucccccaagccccuuggccgguggucugggcuguucugcagcucggcuggagacccgggugguuccuggacagcccugaucggcccuggaacccucccaccuuuuccccugcccuucugguggugacagagggagacaaugcgacguuuaccugcucuuucagcaacacauccgaaucuuucguccucaauugguaccgcaugagcccguccaaccagaccgauaagcuggcugccuuucccgaggacagaucucagccuggccaagauugucgguuccgcgugacacagcuucccaaugggagagacuuucacaugagcguugugcgggcccgcagaaacgauuccggaaccuaucugugcggcgcuauuagccucgccccuaaagcucagaucaaggaaucucugcgggccgagcugcgcgucacagaaagacgggcgugaggacuaguuauaagacugacuagcccgaugggccucccaacgggcccuccuccccuccuugcaccgagauuaauaaaaaaaaaaaaaaaaaaaaaaaaaaaaaaaaaaaaaaaaaaaaaaaaaaaaaaaaaaaaaaaaugcaucccccccccccccccccccccccccccccccaaaggcucuuuucagagccaccagaauu

SEQ ID NO: 212 - RNA, 877 nt, Artificial Sequence
  IL12A mRNA product opt5
gggagaaagcuuaccaugugccccgccagaagccugcuccugguggcuacccuuguccugcucgaccaccugucccuugcccggaaccugccuguugcgacaccggaucccggcauguucccuugucuccaucacucucagaaucugcugcgcgcugugagcaacaugcuccaaaaggccagacagacgcuggaguuuuaccccugcaccuccgaagagaucgaccaugaagauauuacaaaagacaagaccucuacaguggaggccugucuuccucuggaacucaccaaaaaugagagcugccugaacucccgggagacaucuuucaucaccaaugggagcugucuugcuucccgcaagacgagcuuuaugauggcccugugccucucuuccauuuaugaagaucugaaaauguaccaggucgaguucaagaccaugaacgcuaagcugcucauggaccccaaaagacagaucuuucuggaucaaaauaugcuugccgugauugacgaacugaugcaggcgcucaacuucaauagcgagacaguuccucagaagucuucccuggaggaaccggauuuuuauaaaaccaagaucaaacuuuguauccugcuccacgccuuccggauucgcgcugugacaaucgacagagucaugagcuaccugaacgccucuugaggacuaguuauaagacugacuagcccgaugggccucccaacgggcccuccuccccuccuugcaccgagauuaauaaaaaaaaaaaaaaaaaaaaaaaaaaaaaaaaaaaaaaaaaaaaaaaaaaaaaaaaaaaaaaaaugcaucccccccccccccccccccccccccccccccaaaggcucuuuucagagccaccagaauu

SEQ ID NO: 213 - RNA, 874 nt, Artificial Sequence
  IL12A(1-219) mRNA product opt5
gggagaaagcuuaccaugugccccgccagaagccugcuccugguggcuacccuuguccugcucgaccaccugucccuugcccggaaccugccuguugcgacaccggaucccggcauguucccuugucuccaucacucucagaaucugcugcgcgcugugagcaacaugcuccaaaaggccagacagacgcuggaguuuuaccccugcaccuccgaagagaucgaccaugaagauauuacaaaagacaagaccucuacaguggaggccugucuuccucuggaacucaccaaaaaugagagcugccugaacucccgggagacaucuuucaucaccaaugggagcugucuugcuucccgcaagacgagcuuuaugauggcccugugccucucuuccauuuaugaagaucugaaaauguaccaggucgaguucaagaccaugaacgcuaagcugcucauggaccccaaaagacagaucuuucuggaucaaaauaugcuugccgugauugacgaacugaugcaggcgcucaacuucaauagcgagacaguuccucagaagucuucccuggaggaaccggauuuuuauaaaaccaagaucaaacuuuguauccugcuccacgccuuccggauucgcgcugugacaaucgacagagucaugagcuaccugaacgccucuggacuaguuauaagacugacuagcccgaugggccucccaacgggcccuccuccccuccuugcaccgagauuaauaaaaaaaaaaaaaaaaaaaaaaaaaaaaaaaaaaaaaaaaaaaaaaaaaaaaaaaaaaaaaaaaugcaucccccccccccccccccccccccccccccccaaaggcucuuuucagagccaccagaauu

SEQ ID NO: 214 - RNA, 811 nt, Artificial Sequence
  IL12A(23-219) mRNA product opt5
gggagaaagcuuacccggaaccugccuguugcgacaccggaucccggcauguucccuugucuccaucacucucagaaucugcugcgcgcugugagcaacaugcuccaaaaggccagacagacgcuggaguuuuaccccugcaccuccgaagagaucgaccaugaagauauuacaaaagacaagaccucuacaguggaggccugucuuccucuggaacucaccaaaaaugagagcugccugaacucccgggagacaucuuucaucaccaaugggagcugucuugcuucccgcaagacgagcuuuaugauggcccugugccucucuuccauuuaugaagaucugaaaauguaccaggucgaguucaagaccaugaacgcuaagcugcucauggaccccaaaagacagaucuuucuggaucaaaauaugcuugccgugauugacgaacugaugcaggcgcucaacuucaauagcgagacaguuccucagaagucuucccuggaggaaccggauuuuuauaaaaccaagaucaaacuuuguauccugcuccacgccuuccggauucgcgcugugacaaucgacagagucaugagcuaccugaacgccucuugaggacuaguuauaagacugacuagcccgaugggccucccaacgggcccuccuccccuccuugcaccgagauuaauaaaaaaaaaaaaaaaaaaaaaaaaaaaaaaaaaaaaaaaaaaaaaaaaaaaaaaaaaaaaaaaaugcaucccccccccccccccccccccccccccccccaaaggcucuuuucagagccaccagaauu

SEQ ID NO: 215 - RNA, 1204 nt, Artificial Sequence
  IL12B mRNA product opt5
gggagaaagcuuaccaugugccaccagcaacuggugaucagcugguucucccucgucuuucuggccucuccccuuguugcuauuugggagcugaagaaagacguguacguggucgaacucgauugguauccugacgccccgggcgagauggugguucugaccugugauacacccgaagaggacgggaucacguggacccuugaucagagcuccgaagugcugggaucuggcaagacacucaccauucaggucaaagaguucggggacgcgggacaguacacaugccauaagggcggggaggugcugagccacucccugcuccugcuucauaaaaaggaagauggaaucuggucuaccgacauucugaaggaucaaaaagagccuaagaacaaaacauuucucagaugugaagcuaagaauuauagcggccgguuuaccugcugguggcugacgaccaucuccacagaccuuaccuucagcguuaaaucuucccgcggcagcucugauccccagggggugacauguggagccgccacccuguccgcugagagaguccggggcgacaacaaggaguacgaauauagcguggagugccaggaagauucugccuguccugcugccgaggaaucccuccccaucgaggugauggucgacgcgguucacaagcugaaauacgagaauuauacgagcuccuucuuuauucgcgacaucauuaagccugauccgcccaaaaaccugcagcucaagccucugaaaaauucuagacaaguggaagugagcugggaguaccccgacacaugguccaccccucauagcuacuucucucuuacauuuugcguccaggugcaggggaaguccaaacgggaaaagaaggaucgcguuuucaccgacaaaaccagcgccacagugaucuguagaaagaacgcuucuauuagcguccgggcccaggaucgcuauuacuccucuagcugguccgagugggcuagcgugcccugcucuugaggacuaguuauaagacugacuagcccgaugggccucccaacgggcccuccuccccuccuugcaccgagauuaauaaaaaaaaaaaaaaaaaaaaaaaaaaaaaaaaaaaaaaaaaaaaaaaaaaaaaaaaaaaaaaaaugcaucccccccccccccccccccccccccccccccaaaggcucuuuucagagccaccagaauu

SEQ ID NO: 216 - RNA, 1201 nt, Artificial Sequence
  IL12B(1-328) mRNA product opt5
gggagaaagcuuaccaugugccaccagcaacuggugaucagcugguucucccucgucuuucuggccucuccccuuguugcuauuugggagcugaagaaagacguguacguggucgaacucgauugguauccugacgccccgggcgagauggugguucugaccugugauacacccgaagaggacgggaucacguggacccuugaucagagcuccgaagugcugggaucuggcaagacacucaccauucaggucaaagaguucggggacgcgggacaguacacaugccauaagggcggggaggugcugagccacucccugcuccugcuucauaaaaaggaagauggaaucuggucuaccgacauucugaaggaucaaaaagagccuaagaacaaaacauuucucagaugugaagcuaagaauuauagcggccgguuuaccugcugguggcugacgaccaucuccacagaccuuaccuucagcguuaaaucuucccgcggcagcucugauccccagggggugacauguggagccgccacccuguccgcugagagaguccggggcgacaacaaggaguacgaauauagcguggagugccaggaagauucugccuguccugcugccgaggaaucccuccccaucgaggugauggucgacgcgguucacaagcugaaauacgagaauuauacgagcuccuucuuuauucgcgacaucauuaagccugauccgcccaaaaaccugcagcucaagccucugaaaaauucuagacaaguggaagugagcugggaguaccccgacacaugguccaccccucauagcuacuucucucuuacauuuugcguccaggugcaggggaaguccaaacgggaaaagaaggaucgcguuuucaccgacaaaaccagcgccacagugaucuguagaaagaacgcuucuauuagcguccgggcccaggaucgcuauuacuccucuagcugguccgagugggcuagcgugcccugcucuggacuaguuauaagacugacuagcccgaugggccucccaacgggcccuccuccccuccuugcaccgagauuaauaaaaaaaaaaaaaaaaaaaaaaaaaaaaaaaaaaaaaaaaaaaaaaaaaaaaaaaaaaaaaaaaugcaucccccccccccccccccccccccccccccccaaaggcucuuuucagagccaccagaauu

SEQ ID NO: 217 - RNA, 1138 nt, Artificial Sequence
  IL12B(23-328) mRNA product opt5
gggagaaagcuuaccauuugggagcugaagaaagacguguacguggucgaacucgauugguauccugacgccccgggcgagauggugguucugaccugugauacacccgaagaggacgggaucacguggacccuugaucagagcuccgaagugcugggaucuggcaagacacucaccauucaggucaaagaguucggggacgcgggacaguacacaugccauaagggcggggaggugcugagccacucccugcuccugcuucauaaaaaggaagauggaaucuggucuaccgacauucugaaggaucaaaaagagccuaagaacaaaacauuucucagaugugaagcuaagaauuauagcggccgguuuaccugcugguggcugacgaccaucuccacagaccuuaccuucagcguuaaaucuucccgcggcagcucugauccccagggggugacauguggagccgccacccuguccgcugagagaguccggggcgacaacaaggaguacgaauauagcguggagugccaggaagauucugccuguccugcugccgaggaaucccuccccaucgaggugauggucgacgcgguucacaagcugaaauacgagaauuauacgagcuccuucuuuauucgcgacaucauuaagccugauccgcccaaaaaccugcagcucaagccucugaaaaauucuagacaaguggaagugagcugggaguaccccgacacaugguccaccccucauagcuacuucucucuuacauuuugcguccaggugcaggggaaguccaaacgggaaaagaaggaucgcguuuucaccgacaaaaccagcgccacagugaucuguagaaagaacgcuucuauuagcguccgggcccaggaucgcuauuacuccucuagcugguccgagugggcuagcgugcccugcucuugaggacuaguuauaagacugacuagcccgaugggccucccaacgggcccuccuccccuccuugcaccgagauuaauaaaaaaaaaaaaaaaaaaaaaaaaaaaaaaaaaaaaaaaaaaaaaaaaaaaaaaaaaaaaaaaaugcaucccccccccccccccccccccccccccccccaaaggcucuuuucagagccaccagaauu

SEQ ID NO: 218 - RNA, 271 nt, Artificial Sequence
  Linker-sFvCC49-218 mRNA product opt5
gggagaaagcuuaccggcagcaccuccgggucuggaaagcccggcagcggggagggauccacaaaaggcggacuaguuauaagacugacuagcccgaugggccucccaacgggcccuccuccccuccuugcaccgagauuaauaaaaaaaaaaaaaaaaaaaaaaaaaaaaaaaaaaaaaaaaaaaaaaaaaaaaaaaaaaaaaaaaugcaucccccccccccccccccccccccccccccccaaaggcucuuuucagagccaccagaauu

SEQ ID NO: 219 - RNA, 1849 nt, Artificial Sequence
  IL12 mRNA product opt5
gggagaaagcuuaccaugugccaccagcaacuggugaucagcugguucucccucgucuuucuggccucuccccuuguugcuauuugggagcugaagaaagacguguacguggucgaacucgauugguauccugacgccccgggcgagauggugguucugaccugugauacacccgaagaggacgggaucacguggacccuugaucagagcuccgaagugcugggaucuggcaagacacucaccauucaggucaaagaguucggggacgcgggacaguacacaugccauaagggcggggaggugcugagccacucccugcuccugcuucauaaaaaggaagauggaaucuggucuaccgacauucugaaggaucaaaaagagccuaagaacaaaacauuucucagaugugaagcuaagaauuauagcggccgguuuaccugcugguggcugacgaccaucuccacagaccuuaccuucagcguuaaaucuucccgcggcagcucugauccccagggggugacauguggagccgccacccuguccgcugagagaguccggggcgacaacaaggaguacgaauauagcguggagugccaggaagauucugccuguccugcugccgaggaaucccuccccaucgaggugauggucgacgcgguucacaagcugaaauacgagaauuauacgagcuccuucuuuauucgcgacaucauuaagccugauccgcccaaaaaccugcagcucaagccucugaaaaauucuagacaaguggaagugagcugggaguaccccgacacaugguccaccccucauagcuacuucucucuuacauuuugcguccaggugcaggggaaguccaaacgggaaaagaaggaucgcguuuucaccgacaaaaccagcgccacagugaucuguagaaagaacgcuucuauuagcguccgggcccaggaucgcuauuacuccucuagcugguccgagugggcuagcgugcccugcucuggcagcaccuccgggucuggaaagcccggcagcggggagggauccacaaaaggccggaaccugccuguugcgacaccggaucccggcauguucccuugucuccaucacucucagaaucugcugcgcgcugugagcaacaugcuccaaaaggccagacagacgcuggaguuuuaccccugcaccuccgaagagaucgaccaugaagauauuacaaaagacaagaccucuacaguggaggccugucuuccucuggaacucaccaaaaaugagagcugccugaacucccgggagacaucuuucaucaccaaugggagcugucuugcuucccgcaagacgagcuuuaugauggcccugugccucucuuccauuuaugaagaucugaaaauguaccaggucgaguucaagaccaugaacgcuaagcugcucauggaccccaaaagacagaucuuucuggaucaaaauaugcuugccgugauugacgaacugaugcaggcgcucaacuucaauagcgagacaguuccucagaagucuucccuggaggaaccggauuuuuauaaaaccaagaucaaacuuuguauccugcuccacgccuuccggauucgcgcugugacaaucgacagagucaugagcuaccugaacgccucuugaggacuaguuauaagacugacuagcccgaugggccucccaacgggcccuccuccccuccuugcaccgagauuaauaaaaaaaaaaaaaaaaaaaaaaaaaaaaaaaaaaaaaaaaaaaaaaaaaaaaaaaaaaaaaaaaugcaucccccccccccccccccccccccccccccccaaaggcucuuuucagagccaccagaauu

SEQ ID NO: 220 - RNA, 1003 nt, Artificial Sequence
  CD40LG mRNA product opt5
gggagaaagcuuaccaugaucgagaccuacaaccagacaagccccagauccgccgcuacgggccugccuauuucuaugaagaucuucauguaucuccugaccguguuucuuauuacacaaaugaucgggagcgcccuguucgcggucuaccuccaccggcgccuggacaaaauugaagaugagagaaaucuucaugaagacuuuguuuucaugaagaccauccagcggugcaacacaggagagcgcucccugucucuccugaauugugaagagaucaaaagccaguuugagggcuucgugaaggauauuaugcugaacaaagaagagaccaagaaggaaaauuccuuugagaugcagaaaggggaccaaaacccgcagaucgcugcccacgugauuucugaggccagcuccaagacaaccagcguccuccagugggcugaaaaaggauauuacacgaugucuaauaaccuggugacccuugagaauggcaagcagcugacaguuaaaagacaagggcucuauuacaucuaugcccaggugaccuucugcuccaaccgggaagcuagcucucaggcccccuuuauugcgucccugugucuuaagagcccuggacgcuucgagagaauccugcuccgggccgcuaauacacauucuuccgccaagcccugcggccagcaaagcauucaccugggcggggucuuugaacugcagccuggagcuuccguguucguuaacgugaccgaucccucucaggucagccauggcacgggguuuacauccuucggacuccugaaacuuugaggacuaguuauaagacugacuagcccgaugggccucccaacgggcccuccuccccuccuugcaccgagauuaauaaaaaaaaaaaaaaaaaaaaaaaaaaaaaaaaaaaaaaaaaaaaaaaaaaaaaaaaaaaaaaaaugcaucccccccccccccccccccccccccccccccaaaggcucuuuucagagccaccagaauu

SEQ ID NO: 221 - RNA, 1084 nt, Artificial Sequence
  PDCD1 mRNA product opt6
gggagaaagcuuaccaugcaaauaccacaagcaccauggccaguaguaugggcuguacuacaauuagguuggcgaccaggaugguuuuuagacucaccagaucguccauggaacccaccaacauuuucaccagcauuauuaguaguaacagaaggagauaaugcaaccuuuacauguucauucaguaacacaucagaaaguuuuguacuaaauugguauagaaugucaccuucaaaucaaacagauaaauuagcagcauuuccagaagauagaucacaaccaggacaagauugcagauuuagaguaacacaauuaccuaauggacgagacuuucauaugucaguaguaagagcucgacguaacgauucaggaacauacuuauguggagcaauaucauuagcaccaaaagcacaaauaaaagaaucuuuaagagcagaauuaagaguaacagaaagacgcgcagaaguaccaacagcacauccaagcccuucaccacgaccugcaggacaauuucaaacauuaguagucggaguaguaggaggauuauuagguucacugguauuauuaguauggguauuagcaguaauaugcuccagagcagcaagaggaacaauaggagcaagaagaacaggacaaccauuaaaagaagacccaucugcaguaccaguauuuucaguugacuauggagaacuagauuuccaauggagggaaaaaacaccagaaccuccaguuccauguguaccagaacaaacagaauaugcaacaauuguauuucccucaggaaugggaacaucuaguccagcaagaagaggaucagcugauggaccaagaucagcacaaccauuaagaccagaagauggacauuguucauggccauuauaaggacuaguuauaagacugacuagcccgaugggccucccaacgggcccuccuccccuccuugcaccgagauuaauaaaaaaaaaaaaaaaaaaaaaaaaaaaaaaaaaaaaaaaaaaaaaaaaaaaaaaaaaaaaaaaaugcaucccccccccccccccccccccccccccccccaaaggcucuuuucagagccaccagaauu

SEQ ID NO: 222 - RNA, 667 nt, Artificial Sequence
  PDCD1(1-149) mRNA product opt6
gggagaaagcuuaccaugcaaauaccacaagcaccauggccaguaguaugggcuguacuacaauuagguuggcgaccaggaugguuuuuagacucaccagaucguccauggaacccaccaacauuuucaccagcauuauuaguaguaacagaaggagauaaugcaaccuuuacauguucauucaguaacacaucagaaaguuuuguacuaaauugguauagaaugucaccuucaaaucaaacagauaaauuagcagcauuuccagaagauagaucacaaccaggacaagauugcagauuuagaguaacacaauuaccuaauggacgagacuuucauaugucaguaguaagagcucgacguaacgauucaggaacauacuuauguggagcaauaucauuagcaccaaaagcacaaauaaaagaaucuuuaagagcagaauuaagaguaacagaaagacgcgcauaaggacuaguuauaagacugacuagcccgaugggccucccaacgggcccuccuccccuccuugcaccgagauuaauaaaaaaaaaaaaaaaaaaaaaaaaaaaaaaaaaaaaaaaaaaaaaaaaaaaaaaaaaaaaaaaaugcaucccccccccccccccccccccccccccccccaaaggcucuuuucagagccaccagaauu

SEQ ID NO: 223 - RNA, 877 nt, Artificial Sequence
  IL12A mRNA product opt6
gggagaaagcuuaccaugugcccagcaagaucacuacuacugguagcaacacugguacuacuagaccaccuaucacucgccagaaaccucccaguagccacaccagacccaggaauguuccccugccuccaccauucccaaaaccuacuaagagcaguaucaaacaugcuacaaaaagcaagacaaacacuagaguucuauccaugcacaucagaagaaauagaccacgaagacauaacaaaagacaaaacaucaaccguagaagcaugccucccacucgaacucacaaaaaacgaaucaugccuaaacucaagagaaacaucauucauaacaaacggcucaugcuuagccucaagaaaaacaucauucaugauggcacuaugccucucauccauauaugaagacuuaaaaauguaccaaguagaauuuaaaaccaugaacgcaaaauuacuaauggacccaaaaagacaaauauuccuagaccaaaacaugcuagcaguaauagacgaacuaaugcaagcacuaaacuucaacucagaaaccguaccccaaaaaucaucucuagaagaaccagacuucuacaaaacaaaaauaaaacuaugcauacuacuacacgccuucagaauaagagccgucacaauagacagagucaugucauaccuaaacgccucauaaggacuaguuauaagacugacuagcccgaugggccucccaacgggcccuccuccccuccuugcaccgagauuaauaaaaaaaaaaaaaaaaaaaaaaaaaaaaaaaaaaaaaaaaaaaaaaaaaaaaaaaaaaaaaaaaugcaucccccccccccccccccccccccccccccccaaaggcucuuuucagagccaccagaauu

SEQ ID NO: 224 - RNA, 874 nt, Artificial Sequence
  IL12A(1-219) mRNA product opt6
gggagaaagcuuaccaugugcccagcaagaucacuacuacugguagcaacacugguacuacuagaccaccuaucacucgccagaaaccucccaguagccacaccagacccaggaauguuccccugccuccaccauucccaaaaccuacuaagagcaguaucaaacaugcuacaaaaagcaagacaaacacuagaguucuauccaugcacaucagaagaaauagaccacgaagacauaacaaaagacaaaacaucaaccguagaagcaugccucccacucgaacucacaaaaaacgaaucaugccuaaacucaagagaaacaucauucauaacaaacggcucaugcuuagccucaagaaaaacaucauucaugauggcacuaugccucucauccauauaugaagacuuaaaaauguaccaaguagaauuuaaaaccaugaacgcaaaauuacuaauggacccaaaaagacaaauauuccuagaccaaaacaugcuagcaguaauagacgaacuaaugcaagcacuaaacuucaacucagaaaccguaccccaaaaaucaucucuagaagaaccagacuucuacaaaacaaaaauaaaacuaugcauacuacuacacgccuucagaauaagagccgucacaauagacagagucaugucauaccuaaacgccucaggacuaguuauaagacugacuagcccgaugggccucccaacgggcccuccuccccuccuugcaccgagauuaauaaaaaaaaaaaaaaaaaaaaaaaaaaaaaaaaaaaaaaaaaaaaaaaaaaaaaaaaaaaaaaaaugcaucccccccccccccccccccccccccccccccaaaggcucuuuucagagccaccagaauu

SEQ ID NO: 225 - RNA, 811 nt, Artificial Sequence
  IL12A(23-219) mRNA product opt6
gggagaaagcuuaccagaaaccucccaguagccacaccagacccaggaauguuccccugccuccaccauucccaaaaccuacuaagagcaguaucaaacaugcuacaaaaagcaagacaaacacuagaguucuauccaugcacaucagaagaaauagaccacgaagacauaacaaaagacaaaacaucaaccguagaagcaugccucccacucgaacucacaaaaaacgaaucaugccuaaacucaagagaaacaucauucauaacaaacggcucaugcuuagccucaagaaaaacaucauucaugauggcacuaugccucucauccauauaugaagacuuaaaaauguaccaaguagaauuuaaaaccaugaacgcaaaauuacuaauggacccaaaaagacaaauauuccuagaccaaaacaugcuagcaguaauagacgaacuaaugcaagcacuaaacuucaacucagaaaccguaccccaaaaaucaucucuagaagaaccagacuucuacaaaacaaaaauaaaacuaugcauacuacuacacgccuucagaauaagagccgucacaauagacagagucaugucauaccuaaacgccucauaaggacuaguuauaagacugacuagcccgaugggccucccaacgggcccuccuccccuccuugcaccgagauuaauaaaaaaaaaaaaaaaaaaaaaaaaaaaaaaaaaaaaaaaaaaaaaaaaaaaaaaaaaaaaaaaaugcaucccccccccccccccccccccccccccccccaaaggcucuuuucagagccaccagaauu

SEQ ID NO: 226 - RNA, 1204 nt, Artificial Sequence
  IL12B mRNA product opt6
gggagaaagcuuaccaugugccaccaacaacugguaauaucaugguucucacugguauucuuggcaucaccccuaguagcaauaugggaacuaaaaaaagacguauacguaguagaacuagacugguacccagacgcaccaggagaaaugguaguauuaacaugcgacacaccagaagaagauggaauaacuuggacauuagaccaaucaagugaaguauuaggaucaggcaaaacacuaacuauacaaguaaaagaauuuggagacgcaggacaauacacgugccacaaaggaggcgaaguccuaucacauucacuacuauuauuacacaaaaaagaagacggaaucuggagcacagacauauuaaaagaccaaaaagaaccaaaaaacaaaacauuucuaagaugcgaagcuaaaaacuauucaggaagauucacaugcugguggcuaacaaccaucaguaccgacuuaacauucucaguaaaaucaucaagaggaucaucagacccacaaggaguaacauguggagcagcaacacuaagcgcagaaagaguacgaggagacaacaaagaauacgaauauucaguagaaugucaagaagacucagcaugcccugcagcagaagaaucauuaccaauagaaguaauggucgacgcuguacacaaacuaaaauaugaaaauuacacaagcaguuucuucauaagagacauaauaaaacccgacccaccaaaaaaccuacaacuaaaaccauuaaaaaauucaagacaaguagaaguaucaugggaauacccagauacauggagcacaccacacaguuacuucucauuaacauucugcguacaaguacaaggaaaaaguaaaagagaaaaaaaagacagaguauucacagauaagacuucagcaacaguaauaugcagaaaaaacgcaagcauaagcguacgagcacaagacagauauuacucaagcucauggucagaaugggcaucaguaccauguucauaaggacuaguuauaagacugacuagcccgaugggccucccaacgggcccuccuccccuccuugcaccgagauuaauaaaaaaaaaaaaaaaaaaaaaaaaaaaaaaaaaaaaaaaaaaaaaaaaaaaaaaaaaaaaaaaaugcaucccccccccccccccccccccccccccccccaaaggcucuuuucagagccaccagaauu

SEQ ID NO: 227 - RNA, 1201 nt, Artificial Sequence
  IL12B(1-328) mRNA product opt6
gggagaaagcuuaccaugugccaccaacaacugguaauaucaugguucucacugguauucuuggcaucaccccuaguagcaauaugggaacuaaaaaaagacguauacguaguagaacuagacugguacccagacgcaccaggagaaaugguaguauuaacaugcgacacaccagaagaagauggaauaacuuggacauuagaccaaucaagugaaguauuaggaucaggcaaaacacuaacuauacaaguaaaagaauuuggagacgcaggacaauacacgugccacaaaggaggcgaaguccuaucacauucacuacuauuauuacacaaaaaagaagacggaaucuggagcacagacauauuaaaagaccaaaaagaaccaaaaaacaaaacauuucuaagaugcgaagcuaaaaacuauucaggaagauucacaugcugguggcuaacaaccaucaguaccgacuuaacauucucaguaaaaucaucaagaggaucaucagacccacaaggaguaacauguggagcagcaacacuaagcgcagaaagaguacgaggagacaacaaagaauacgaauauucaguagaaugucaagaagacucagcaugcccugcagcagaagaaucauuaccaauagaaguaauggucgacgcuguacacaaacuaaaauaugaaaauuacacaagcaguuucuucauaagagacauaauaaaacccgacccaccaaaaaaccuacaacuaaaaccauuaaaaaauucaagacaaguagaaguaucaugggaauacccagauacauggagcacaccacacaguuacuucucauuaacauucugcguacaaguacaaggaaaaaguaaaagagaaaaaaaagacagaguauucacagauaagacuucagcaacaguaauaugcagaaaaaacgcaagcauaagcguacgagcacaagacagauauuacucaagcucauggucagaaugggcaucaguaccauguucaggacuaguuauaagacugacuagcccgaugggccucccaacgggcccuccuccccuccuugcaccgagauuaauaaaaaaaaaaaaaaaaaaaaaaaaaaaaaaaaaaaaaaaaaaaaaaaaaaaaaaaaaaaaaaaaugcaucccccccccccccccccccccccccccccccaaaggcucuuuucagagccaccagaauu

SEQ ID NO: 228 - RNA, 1138 nt, Artificial Sequence
  IL12B(23-328) mRNA product opt6
gggagaaagcuuaccauaugggaacuaaaaaaagacguauacguaguagaacuagacugguacccagacgcaccaggagaaaugguaguauuaacaugcgacacaccagaagaagauggaauaacuuggacauuagaccaaucaagugaaguauuaggaucaggcaaaacacuaacuauacaaguaaaagaauuuggagacgcaggacaauacacgugccacaaaggaggcgaaguccuaucacauucacuacuauuauuacacaaaaaagaagacggaaucuggagcacagacauauuaaaagaccaaaaagaaccaaaaaacaaaacauuucuaagaugcgaagcuaaaaacuauucaggaagauucacaugcugguggcuaacaaccaucaguaccgacuuaacauucucaguaaaaucaucaagaggaucaucagacccacaaggaguaacauguggagcagcaacacuaagcgcagaaagaguacgaggagacaacaaagaauacgaauauucaguagaaugucaagaagacucagcaugcccugcagcagaagaaucauuaccaauagaaguaauggucgacgcuguacacaaacuaaaauaugaaaauuacacaagcaguuucuucauaagagacauaauaaaacccgacccaccaaaaaaccuacaacuaaaaccauuaaaaaauucaagacaaguagaaguaucaugggaauacccagauacauggagcacaccacacaguuacuucucauuaacauucugcguacaaguacaaggaaaaaguaaaagagaaaaaaaagacagaguauucacagauaagacuucagcaacaguaauaugcagaaaaaacgcaagcauaagcguacgagcacaagacagauauuacucaagcucauggucagaaugggcaucaguaccauguucauaaggacuaguuauaagacugacuagcccgaugggccucccaacgggcccuccuccccuccuugcaccgagauuaauaaaaaaaaaaaaaaaaaaaaaaaaaaaaaaaaaaaaaaaaaaaaaaaaaaaaaaaaaaaaaaaaugcaucccccccccccccccccccccccccccccccaaaggcucuuuucagagccaccagaauu

SEQ ID NO: 229 - RNA, 271 nt, Artificial Sequence
  Linker-sFvCC49-218 mRNA product opt6
gggagaaagcuuaccggaaguacaaguggaaguggaaaaccaggaaguggagaaggaaguacaaaaggaggacuaguuauaagacugacuagcccgaugggccucccaacgggcccuccuccccuccuugcaccgagauuaauaaaaaaaaaaaaaaaaaaaaaaaaaaaaaaaaaaaaaaaaaaaaaaaaaaaaaaaaaaaaaaaaugcaucccccccccccccccccccccccccccccccaaaggcucuuuucagagccaccagaauu

SEQ ID NO: 230 - RNA, 1849 nt, Artificial Sequence
  IL12 mRNA product opt6
gggagaaagcuuaccaugugccaccaacaacugguaauaucaugguucucacugguauucuuggcaucaccccuaguagcaauaugggaacuaaaaaaagacguauacguaguagaacuagacugguacccagacgcaccaggagaaaugguaguauuaacaugcgacacaccagaagaagauggaauaacuuggacauuagaccaaucaagugaaguauuaggaucaggcaaaacacuaacuauacaaguaaaagaauuuggagacgcaggacaauacacgugccacaaaggaggcgaaguccuaucacauucacuacuauuauuacacaaaaaagaagacggaaucuggagcacagacauauuaaaagaccaaaaagaaccaaaaaacaaaacauuucuaagaugcgaagcuaaaaacuauucaggaagauucacaugcugguggcuaacaaccaucaguaccgacuuaacauucucaguaaaaucaucaagaggaucaucagacccacaaggaguaacauguggagcagcaacacuaagcgcagaaagaguacgaggagacaacaaagaauacgaauauucaguagaaugucaagaagacucagcaugcccugcagcagaagaaucauuaccaauagaaguaauggucgacgcuguacacaaacuaaaauaugaaaauuacacaagcaguuucuucauaagagacauaauaaaacccgacccaccaaaaaaccuacaacuaaaaccauuaaaaaauucaagacaaguagaaguaucaugggaauacccagauacauggagcacaccacacaguuacuucucauuaacauucugcguacaaguacaaggaaaaaguaaaagagaaaaaaaagacagaguauucacagauaagacuucagcaacaguaauaugcagaaaaaacgcaagcauaagcguacgagcacaagacagauauuacucaagcucauggucagaaugggcaucaguaccauguucaggaaguacaaguggaaguggaaaaccaggaaguggagaaggaaguacaaaaggaagaaaccucccaguagccacaccagacccaggaauguuccccugccuccaccauucccaaaaccuacuaagagcaguaucaaacaugcuacaaaaagcaagacaaacacuagaguucuauccaugcacaucagaagaaauagaccacgaagacauaacaaaagacaaaacaucaaccguagaagcaugccucccacucgaacucacaaaaaacgaaucaugccuaaacucaagagaaacaucauucauaacaaacggcucaugcuuagccucaagaaaaacaucauucaugauggcacuaugccucucauccauauaugaagacuuaaaaauguaccaaguagaauuuaaaaccaugaacgcaaaauuacuaauggacccaaaaagacaaauauuccuagaccaaaacaugcuagcaguaauagacgaacuaaugcaagcacuaaacuucaacucagaaaccguaccccaaaaaucaucucuagaagaaccagacuucuacaaaacaaaaauaaaacuaugcauacuacuacacgccuucagaauaagagccgucacaauagacagagucaugucauaccuaaacgccucauaaggacuaguuauaagacugacuagcccgaugggccucccaacgggcccuccuccccuccuugcaccgagauuaauaaaaaaaaaaaaaaaaaaaaaaaaaaaaaaaaaaaaaaaaaaaaaaaaaaaaaaaaaaaaaaaaugcaucccccccccccccccccccccccccccccccaaaggcucuuuucagagccaccagaauu

SEQ ID NO: 231 - RNA, 1003 nt, Artificial Sequence
  CD40LG mRNA product opt6
gggagaaagcuuaccaugauagaaacauauaaucaaacaagcccaagaucagcagcaacaggacuaccaauaucaaugaaaauauucauguaccuacucacagucuuccuaauaacacaaaugauaggaucugcccuauuugcaguauaccuacacagaagacuagauaaaauagaagacgaaagaaaccuacaugaagacuucguauucaugaaaacaauacaaagaugcaacaccggagaaagaucccuaucacuacuaaacugcgaagaaauaaaaucacaauucgaaggauucguaaaagacauaaugcuaaacaaagaagaaacaaaaaaagaaaacucuuucgaaaugcaaaaaggagaccaaaacccacaaauagcugcacacgucauaucagaagcaucaucaaaaacaacaucaguacuucaaugggcagaaaaaggauacuauacaaugucaaacaaucuaguaacccuagaaaacggaaaacaacuaacaguaaaaagacaaggacuauacuauauauacgcacaaguaacauucugcucaaacagagaagcaucaucacaagcaccauucaucgcaucacuaugccuaaaauccccaggaagauucgaacgaauccuacuaagagcagcaaacacacacucaucagcaaaaccaugcggccaacaaucaauacaccuaggaggaguauucgaacuacaaccaggagcaucaguauucguaaacguaacagaccccucacaaguaagccacggcacaggauucacaucauuuggacuauuaaaauuauaaggacuaguuauaagacugacuagcccgaugggccucccaacgggcccuccuccccuccuugcaccgagauuaauaaaaaaaaaaaaaaaaaaaaaaaaaaaaaaaaaaaaaaaaaaaaaaaaaaaaaaaaaaaaaaaaugcaucccccccccccccccccccccccccccccccaaaggcucuuuucagagccaccagaauu

SEQ ID NO: 232 - RNA, 1084 nt, Artificial Sequence
  PDCD1 mRNA product opt7
gggagaaagcuuaccaugcagaucccccaagccccauggccgguggucugggcagugcugcagcucggcuggaggcccgggugguuccuggacagcccagaucggcccuggaacccacccaccuuuuccccagccuugcugguagugacugagggugacaaugcgaccuucacgugcaguuuuagcaacacuuccgaaaguuucguccucaauugguaccgcaugagcccguccaaccagaccgauaagcuggccgcauuucccgaggacaggagccagccaggccaagauugucgguuccgcgugacccaguugcccaaugggagggacuuucacauguccgugguccgggcccgcaggaacgauaguggcacuuaucugugcggugcaauuagccucgccccaaaagcgcagaucaaggaaucccugcgggccgagcugcgcgugaccgaaaggcgggcagagguacccacggcccauccgagccccaguccacgccccgccgggcaguuccaaacucucguggucggcguggugggcgggcuguuggguucccugguccuccugguguggguacuggcagugauuuguagcagggccgcgcggggcaccaucggggcccgcaggacuggccagccauugaaagaggaccccuccgcagucccaguguuuaguguggauuacggugaacucgacuuccaguggcgggagaagaccccggaacccccaguccccugcgugccagagcagaccgaguaugccacgauuguauuucccagcgggaugggcacuuccagcccggcacgcaggggcagugccgaugggccacgguccgcccaaccccugaggcccgaagacggucacuguagcuggccacugugaggacuaguuauaagacugacuagcccgaugggccucccaacgggcccuccuccccuccuugcaccgagauuaauaaaaaaaaaaaaaaaaaaaaaaaaaaaaaaaaaaaaaaaaaaaaaaaaaaaaaaaaaaaaaaaaugcaucccccccccccccccccccccccccccccccaaaggcucuuuucagagccaccagaauu

SEQ ID NO: 233 - RNA, 667 nt, Artificial Sequence
  PDCD1(1-149) mRNA product opt7
gggagaaagcuuaccaugcagaucccccaagccccauggccgguggucugggcagugcugcagcucggcuggaggcccgggugguuccuggacagcccagaucggcccuggaacccacccaccuuuuccccagccuugcugguagugacugagggugacaaugcgaccuucacgugcaguuuuagcaacacuuccgaaaguuucguccucaauugguaccgcaugagcccguccaaccagaccgauaagcuggccgcauuucccgaggacaggagccagccaggccaagauugucgguuccgcgugacccaguugcccaaugggagggacuuucacauguccgugguccgggcccgcaggaacgauaguggcacuuaucugugcggugcaauuagccucgccccaaaagcgcagaucaaggaaucccugcgggccgagcugcgcgugaccgaaaggcgggcaugaggacuaguuauaagacugacuagcccgaugggccucccaacgggcccuccuccccuccuugcaccgagauuaauaaaaaaaaaaaaaaaaaaaaaaaaaaaaaaaaaaaaaaaaaaaaaaaaaaaaaaaaaaaaaaaaugcaucccccccccccccccccccccccccccccccaaaggcucuuuucagagccaccagaauu

SEQ ID NO: 234 - RNA, 877 nt, Artificial Sequence
  IL12A mRNA product opt7
gggagaaagcuuaccaugugccccgccaggagccugcuccugguggcaaccuugguccugcucgaccaccuguccuuggcccggaaccugccaguggcgacuccggaucccggcauguucccaugucuccaucacagucagaaucugcugcgcgccguaagcaacaugcuccaaaaggcaaggcagacccuggaguuuuaccccugcacguccgaagagaucgaccaugaagauauuacuaaagacaagaccaguaccguggaggccuguuugccacuggaacucacuaaaaaugagagcugccugaacucccgggagaccagcuucaucacgaauggguccugucuggcaagucgcaagacuagcuuuaugauggccuugugccucuccagcauuuaugaagaucugaaaauguaccaggucgaguucaagaccaugaacgcgaagcugcucauggaccccaaaaggcagaucuuucuggaucaaaauauguuggccgugauugacgaacugaugcaggcacucaacuucaauagugagacugugccacagaaguccagccuggaggaaccggauuuuuauaaaaccaagaucaaacuguguaucuugcuccacgccuuccggauucgcgccgucaccaucgacagggugauguccuaccugaacgcaaguugaggacuaguuauaagacugacuagcccgaugggccucccaacgggcccuccuccccuccuugcaccgagauuaauaaaaaaaaaaaaaaaaaaaaaaaaaaaaaaaaaaaaaaaaaaaaaaaaaaaaaaaaaaaaaaaaugcaucccccccccccccccccccccccccccccccaaaggcucuuuucagagccaccagaauu

SEQ ID NO: 235 - RNA, 874 nt, Artificial Sequence
  IL12A(1-219) mRNA product opt7
gggagaaagcuuaccaugugccccgccaggagccugcuccugguggcaaccuugguccugcucgaccaccuguccuuggcccggaaccugccaguggcgacuccggaucccggcauguucccaugucuccaucacagucagaaucugcugcgcgccguaagcaacaugcuccaaaaggcaaggcagacccuggaguuuuaccccugcacguccgaagagaucgaccaugaagauauuacuaaagacaagaccaguaccguggaggccuguuugccacuggaacucacuaaaaaugagagcugccugaacucccgggagaccagcuucaucacgaauggguccugucuggcaagucgcaagacuagcuuuaugauggccuugugccucuccagcauuuaugaagaucugaaaauguaccaggucgaguucaagaccaugaacgcgaagcugcucauggaccccaaaaggcagaucuuucuggaucaaaauauguuggccgugauugacgaacugaugcaggcacucaacuucaauagugagacugugccacagaaguccagccuggaggaaccggauuuuuauaaaaccaagaucaaacuguguaucuugcuccacgccuuccggauucgcgccgucaccaucgacagggugauguccuaccugaacgcaaguggacuaguuauaagacugacuagcccgaugggccucccaacgggcccuccuccccuccuugcaccgagauuaauaaaaaaaaaaaaaaaaaaaaaaaaaaaaaaaaaaaaaaaaaaaaaaaaaaaaaaaaaaaaaaaaugcaucccccccccccccccccccccccccccccccaaaggcucuuuucagagccaccagaauu

SEQ ID NO: 236 - RNA, 811 nt, Artificial Sequence
  IL12A(23-219) mRNA product opt7
gggagaaagcuuacccggaaccugccaguggcgacuccggaucccggcauguucccaugucuccaucacagucagaaucugcugcgcgccguaagcaacaugcuccaaaaggcaaggcagacccuggaguuuuaccccugcacguccgaagagaucgaccaugaagauauuacuaaagacaagaccaguaccguggaggccuguuugccacuggaacucacuaaaaaugagagcugccugaacucccgggagaccagcuucaucacgaauggguccugucuggcaagucgcaagacuagcuuuaugauggccuugugccucuccagcauuuaugaagaucugaaaauguaccaggucgaguucaagaccaugaacgcgaagcugcucauggaccccaaaaggcagaucuuucuggaucaaaauauguuggccgugauugacgaacugaugcaggcacucaacuucaauagugagacugugccacagaaguccagccuggaggaaccggauuuuuauaaaaccaagaucaaacuguguaucuugcuccacgccuuccggauucgcgccgucaccaucgacagggugauguccuaccugaacgcaaguugaggacuaguuauaagacugacuagcccgaugggccucccaacgggcccuccuccccuccuugcaccgagauuaauaaaaaaaaaaaaaaaaaaaaaaaaaaaaaaaaaaaaaaaaaaaaaaaaaaaaaaaaaaaaaaaaugcaucccccccccccccccccccccccccccccccaaaggcucuuuucagagccaccagaauu

SEQ ID NO: 237 - RNA, 1204 nt, Artificial Sequence
  IL12B mRNA product opt7
gggagaaagcuuaccaugugccaccagcaacuggugaucagcugguucucccucgucuuucuggccagucccuugguggcaauuugggagcugaagaaagacguauacguggucgaacucgauugguauccagacgccccgggcgagaugguggugcugaccugugauacucccgaagaggacgggaucaccuggacguuggaucagagcuccgaaguccuggguaguggcaagacucucaccauucaggugaaagaguucggggacgcgggccaguauaccugccauaaggguggggagguacugagccacucccugcuccuguugcauaaaaaggaagauggcaucuggagcacugacauucugaaggaucaaaaagagccaaagaacaaaaccuuucucaggugugaagccaagaauuacuccggccgguucacgugcugguggcugacuaccaucaguacugaccugaccuuuagcgugaaauccagccgcgggaguuccgauccccagggugucaccuguggcgcagccacguugagcgcagagagggugcgcggggacaacaaggaguacgaauauuccguggagugccaggaagauagugccuguccagcggccgaggaaagccuccccaucgaggucaugguggacgcaguacacaaacugaaguacgagaauuauacuuccagcuucuuuauucgggacaucauuaagccagauccgcccaaaaaccugcagcucaagccacugaaaaauaguaggcaaguggaagucuccugggaguaccccgacaccuggagcacuccacauaguuacuucuccuugaccuuuugcguccaggugcagggcaagagcaaacgggaaaagaaggaucgcguguucaccgacaaaacuagcgccacggugaucuguaggaagaacgccuccauuaguguacgggcacaggaucgcuauuacagcuccagcuggagugagugggccuccgugcccugcagcugaggacuaguuauaagacugacuagcccgaugggccucccaacgggcccuccuccccuccuugcaccgagauuaauaaaaaaaaaaaaaaaaaaaaaaaaaaaaaaaaaaaaaaaaaaaaaaaaaaaaaaaaaaaaaaaaugcaucccccccccccccccccccccccccccccccaaaggcucuuuucagagccaccagaauu

SEQ ID NO: 238 - RNA, 1201 nt, Artificial Sequence
  IL12B(1-328) mRNA product opt7
gggagaaagcuuaccaugugccaccagcaacuggugaucagcugguucucccucgucuuucuggccagucccuugguggcaauuugggagcugaagaaagacguauacguggucgaacucgauugguauccagacgccccgggcgagaugguggugcugaccugugauacucccgaagaggacgggaucaccuggacguuggaucagagcuccgaaguccuggguaguggcaagacucucaccauucaggugaaagaguucggggacgcgggccaguauaccugccauaaggguggggagguacugagccacucccugcuccuguugcauaaaaaggaagauggcaucuggagcacugacauucugaaggaucaaaaagagccaaagaacaaaaccuuucucaggugugaagccaagaauuacuccggccgguucacgugcugguggcugacuaccaucaguacugaccugaccuuuagcgugaaauccagccgcgggaguuccgauccccagggugucaccuguggcgcagccacguugagcgcagagagggugcgcggggacaacaaggaguacgaauauuccguggagugccaggaagauagugccuguccagcggccgaggaaagccuccccaucgaggucaugguggacgcaguacacaaacugaaguacgagaauuauacuuccagcuucuuuauucgggacaucauuaagccagauccgcccaaaaaccugcagcucaagccacugaaaaauaguaggcaaguggaagucuccugggaguaccccgacaccuggagcacuccacauaguuacuucuccuugaccuuuugcguccaggugcagggcaagagcaaacgggaaaagaaggaucgcguguucaccgacaaaacuagcgccacggugaucuguaggaagaacgccuccauuaguguacgggcacaggaucgcuauuacagcuccagcuggagugagugggccuccgugcccugcagcggacuaguuauaagacugacuagcccgaugggccucccaacgggcccuccuccccuccuugcaccgagauuaauaaaaaaaaaaaaaaaaaaaaaaaaaaaaaaaaaaaaaaaaaaaaaaaaaaaaaaaaaaaaaaaaugcaucccccccccccccccccccccccccccccccaaaggcucuuuucagagccaccagaauu

SEQ ID NO: 239 - RNA, 1138 nt, Artificial Sequence
  IL12B(23-328) mRNA product opt7
gggagaaagcuuaccauuugggagcugaagaaagacguauacguggucgaacucgauugguauccagacgccccgggcgagaugguggugcugaccugugauacucccgaagaggacgggaucaccuggacguuggaucagagcuccgaaguccuggguaguggcaagacucucaccauucaggugaaagaguucggggacgcgggccaguauaccugccauaaggguggggagguacugagccacucccugcuccuguugcauaaaaaggaagauggcaucuggagcacugacauucugaaggaucaaaaagagccaaagaacaaaaccuuucucaggugugaagccaagaauuacuccggccgguucacgugcugguggcugacuaccaucaguacugaccugaccuuuagcgugaaauccagccgcgggaguuccgauccccagggugucaccuguggcgcagccacguugagcgcagagagggugcgcggggacaacaaggaguacgaauauuccguggagugccaggaagauagugccuguccagcggccgaggaaagccuccccaucgaggucaugguggacgcaguacacaaacugaaguacgagaauuauacuuccagcuucuuuauucgggacaucauuaagccagauccgcccaaaaaccugcagcucaagccacugaaaaauaguaggcaaguggaagucuccugggaguaccccgacaccuggagcacuccacauaguuacuucuccuugaccuuuugcguccaggugcagggcaagagcaaacgggaaaagaaggaucgcguguucaccgacaaaacuagcgccacggugaucuguaggaagaacgccuccauuaguguacgggcacaggaucgcuauuacagcuccagcuggagugagugggccuccgugcccugcagcugaggacuaguuauaagacugacuagcccgaugggccucccaacgggcccuccuccccuccuugcaccgagauuaauaaaaaaaaaaaaaaaaaaaaaaaaaaaaaaaaaaaaaaaaaaaaaaaaaaaaaaaaaaaaaaaaugcaucccccccccccccccccccccccccccccccaaaggcucuuuucagagccaccagaauu

SEQ ID NO: 240 - RNA, 271 nt, Artificial Sequence
  Linker-sFvCC49-218 mRNA product opt7
gggagaaagcuuaccggcagcaccuccgggagugguaagcccggcagcggggagggcuccacuaaagguggacuaguuauaagacugacuagcccgaugggccucccaacgggcccuccuccccuccuugcaccgagauuaauaaaaaaaaaaaaaaaaaaaaaaaaaaaaaaaaaaaaaaaaaaaaaaaaaaaaaaaaaaaaaaaaugcaucccccccccccccccccccccccccccccccaaaggcucuuuucagagccaccagaauu

SEQ ID NO: 241 - RNA, 1849 nt, Artificial Sequence
  IL12 mRNA product opt7
gggagaaagcuuaccaugugccaccagcaacuggugaucagcugguucucccucgucuuucuggccagucccuugguggcaauuugggagcugaagaaagacguauacguggucgaacucgauugguauccagacgccccgggcgagaugguggugcugaccugugauacucccgaagaggacgggaucaccuggacguuggaucagagcuccgaaguccuggguaguggcaagacucucaccauucaggugaaagaguucggggacgcgggccaguauaccugccauaaggguggggagguacugagccacucccugcuccuguugcauaaaaaggaagauggcaucuggagcacugacauucugaaggaucaaaaagagccaaagaacaaaaccuuucucaggugugaagccaagaauuacuccggccgguucacgugcugguggcugacuaccaucaguacugaccugaccuuuagcgugaaauccagccgcgggaguuccgauccccagggugucaccuguggcgcagccacguugagcgcagagagggugcgcggggacaacaaggaguacgaauauuccguggagugccaggaagauagugccuguccagcggccgaggaaagccuccccaucgaggucaugguggacgcaguacacaaacugaaguacgagaauuauacuuccagcuucuuuauucgggacaucauuaagccagauccgcccaaaaaccugcagcucaagccacugaaaaauaguaggcaaguggaagucuccugggaguaccccgacaccuggagcacuccacauaguuacuucuccuugaccuuuugcguccaggugcagggcaagagcaaacgggaaaagaaggaucgcguguucaccgacaaaacuagcgccacggugaucuguaggaagaacgccuccauuaguguacgggcacaggaucgcuauuacagcuccagcuggagugagugggccuccgugcccugcagcggcagcaccuccgggagugguaagcccggcagcggggagggcuccacuaaaggucggaaccugccaguggcgacuccggaucccggcauguucccaugucuccaucacagucagaaucugcugcgcgccguaagcaacaugcuccaaaaggcaaggcagacccuggaguuuuaccccugcacguccgaagagaucgaccaugaagauauuacuaaagacaagaccaguaccguggaggccuguuugccacuggaacucacuaaaaaugagagcugccugaacucccgggagaccagcuucaucacgaauggguccugucuggcaagucgcaagacuagcuuuaugauggccuugugccucuccagcauuuaugaagaucugaaaauguaccaggucgaguucaagaccaugaacgcgaagcugcucauggaccccaaaaggcagaucuuucuggaucaaaauauguuggccgugauugacgaacugaugcaggcacucaacuucaauagugagacugugccacagaaguccagccuggaggaaccggauuuuuauaaaaccaagaucaaacuguguaucuugcuccacgccuuccggauucgcgccgucaccaucgacagggugauguccuaccugaacgcaaguugaggacuaguuauaagacugacuagcccgaugggccucccaacgggcccuccuccccuccuugcaccgagauuaauaaaaaaaaaaaaaaaaaaaaaaaaaaaaaaaaaaaaaaaaaaaaaaaaaaaaaaaaaaaaaaaaugcaucccccccccccccccccccccccccccccccaaaggcucuuuucagagccaccagaauu

SEQ ID NO: 242 - RNA, 1003 nt, Artificial Sequence
  CD40LG mRNA product opt7
gggagaaagcuuaccaugaucgagaccuacaaccagacuagccccagguccgccgcaaccggccugccaauuaguaugaagaucuucauguaucuccugacgguguuuuugauuacucaaaugaucgggagcgcccuguucgcggucuaccuccaccggcgccuggacaaaauugaagaugagaggaauuugcaugaagacuuuguguucaugaagaccauccagcggugcaacaccggugagcgcucccugagucuccugaauugugaagagaucaaaagccaguuugagggcuucguaaaggauauuaugcugaacaaagaagagacuaagaaggaaaauuccuuugagaugcagaaaggggaccaaaacccgcagaucgccgcacacgugauuagcgaggccuccaguaagaccacgagcguccuccagugggcagaaaaaggcuauuacacuauguccaauaaccuggugaccuuggagaaugguaagcagcugacugugaaaaggcaagggcucuauuacaucuaugcccaggucaccuucugcagcaaccgggaagcgaguucccaggcccccuuuauugcaagccugugucugaaguccccaggccgcuucgagaggaucuugcuccgggccgccaauacccauaguagcgcaaaacccugcggccagcaauccauucaccucggggguguguuugaacugcagccaggcgccagcguauucgugaacgucacggaucccagucaggugucccaugggacuggcuucaccagcuuuggucugcugaaguugugaggacuaguuauaagacugacuagcccgaugggccucccaacgggcccuccuccccuccuugcaccgagauuaauaaaaaaaaaaaaaaaaaaaaaaaaaaaaaaaaaaaaaaaaaaaaaaaaaaaaaaaaaaaaaaaaugcaucccccccccccccccccccccccccccccccaaaggcucuuuucagagccaccagaauu

SEQ ID NO: 243 - RNA, 1084 nt, Artificial Sequence
  PDCD1 mRNA product opt8
gggagaaagcuuaccaugcaaaucccacaagcccccuggcccguagucugggccguacuacaacuaggcuggagacccggcugguuucucgacagccccgaccgacccuggaacccccccaccuucucacccgcccuccucgucgucaccgaaggcgacaacgccacauucacaugcuccuucuccaacaccucugaaucauucguccuaaacugguaccgaaugucacccuccaaccaaacugacaaacucgccgccuuucccgaagaccgcucccaacccggccaagacugccgauuccgagucacacaacuuccuaacggcagagacuuccacauguccguaguccgagcccgccgaaacgacuccggaaccuaccucugcggagccaucucccucgcccccaaagcccaaaucaaagaaucccuccgagcagaacuccgcgucaccgaacgccgcgccgaaguccccaccgcacacccaucacccuccccccgccccgccggccaauuccaaacacuuguaguaggcgucgucggcggccuccuuggaucacucguccuacuuguauggguccuagccgucaucugcucucgcgccgcacgcggcaccaucggcgcacgacgaaccggccaaccucuaaaagaagaccccuccgcaguccccgucuucuccgucgacuacggcgaacucgacuuccaauggcgcgaaaaaacccccgaacccccaguccccugcguacccgaacaaaccgaauacgcaacaaucguauuccccucaggaaugggcaccucaucccccgcccgacgaggaucagccgacggcccacgauccgcccaaccccuccgaccagaagacggccacugcucauggccccuuuaaggacuaguuauaagacugacuagcccgaugggccucccaacgggcccuccuccccuccuugcaccgagauuaauaaaaaaaaaaaaaaaaaaaaaaaaaaaaaaaaaaaaaaaaaaaaaaaaaaaaaaaaaaaaaaaaugcaucccccccccccccccccccccccccccccccaaaggcucuuuucagagccaccagaauu

SEQ ID NO: 244 - RNA, 667 nt, Artificial Sequence
  PDCD1(1-149) mRNA product opt8
gggagaaagcuuaccaugcaaaucccacaagcccccuggcccguagucugggccguacuacaacuaggcuggagacccggcugguuucucgacagccccgaccgacccuggaacccccccaccuucucacccgcccuccucgucgucaccgaaggcgacaacgccacauucacaugcuccuucuccaacaccucugaaucauucguccuaaacugguaccgaaugucacccuccaaccaaacugacaaacucgccgccuuucccgaagaccgcucccaacccggccaagacugccgauuccgagucacacaacuuccuaacggcagagacuuccacauguccguaguccgagcccgccgaaacgacuccggaaccuaccucugcggagccaucucccucgcccccaaagcccaaaucaaagaaucccuccgagcagaacuccgcgucaccgaacgccgcgccuaaggacuaguuauaagacugacuagcccgaugggccucccaacgggcccuccuccccuccuugcaccgagauuaauaaaaaaaaaaaaaaaaaaaaaaaaaaaaaaaaaaaaaaaaaaaaaaaaaaaaaaaaaaaaaaaaugcaucccccccccccccccccccccccccccccccaaaggcucuuuucagagccaccagaauu

SEQ ID NO: 245 - RNA, 877 nt, Artificial Sequence
  IL12A mRNA product opt8
gggagaaagcuuaccaugugccccgccagaucccuccuacucgucgcaacacuuguccuccucgaccaccucucccucgcccgcaaucuccccgucgccacccccgaccccggaauguuucccugccuccaccacucacaaaaccuccuacgcgccgucucaaacaugcuucaaaaagcccgacaaacccucgaauuuuaccccugcaccuccgaagaaaucgaccacgaagacauaaccaaagacaaaaccuccaccgucgaagccugccuaccauuagaacuaaccaaaaacgaauccugccucaacucacgcgaaaccuccuucaucacaaacggcucaugccucgccucacgcaaaaccuccuucaugauggcccucugccuaucaucaaucuaugaagaccucaaaauguaccaaguagaauuuaaaaccaugaacgccaaacuccucauggaccccaaacgccaaaucuuccucgaccaaaacaugcucgcagucaucgacgaacucaugcaagcccucaacuucaacucagaaacagucccacaaaaauccucccucgaagaacccgacuucuauaaaaccaaaaucaaacucugcauccuccuccacgccuuccgcauacgcgccguaaccaucgaccgcguaaugucauaccuaaaugccucuuaaggacuaguuauaagacugacuagcccgaugggccucccaacgggcccuccuccccuccuugcaccgagauuaauaaaaaaaaaaaaaaaaaaaaaaaaaaaaaaaaaaaaaaaaaaaaaaaaaaaaaaaaaaaaaaaaugcaucccccccccccccccccccccccccccccccaaaggcucuuuucagagccaccagaauu

SEQ ID NO: 246 - RNA, 874 nt, Artificial Sequence
  IL12A(1-219) mRNA product opt8
gggagaaagcuuaccaugugccccgccagaucccuccuacucgucgcaacacuuguccuccucgaccaccucucccucgcccgcaaucuccccgucgccacccccgaccccggaauguuucccugccuccaccacucacaaaaccuccuacgcgccgucucaaacaugcuucaaaaagcccgacaaacccucgaauuuuaccccugcaccuccgaagaaaucgaccacgaagacauaaccaaagacaaaaccuccaccgucgaagccugccuaccauuagaacuaaccaaaaacgaauccugccucaacucacgcgaaaccuccuucaucacaaacggcucaugccucgccucacgcaaaaccuccuucaugauggcccucugccuaucaucaaucuaugaagaccucaaaauguaccaaguagaauuuaaaaccaugaacgccaaacuccucauggaccccaaacgccaaaucuuccucgaccaaaacaugcucgcagucaucgacgaacucaugcaagcccucaacuucaacucagaaacagucccacaaaaauccucccucgaagaacccgacuucuauaaaaccaaaaucaaacucugcauccuccuccacgccuuccgcauacgcgccguaaccaucgaccgcguaaugucauaccuaaaugccucuggacuaguuauaagacugacuagcccgaugggccucccaacgggcccuccuccccuccuugcaccgagauuaauaaaaaaaaaaaaaaaaaaaaaaaaaaaaaaaaaaaaaaaaaaaaaaaaaaaaaaaaaaaaaaaaugcaucccccccccccccccccccccccccccccccaaaggcucuuuucagagccaccagaauu

SEQ ID NO: 247 - RNA, 811 nt, Artificial Sequence
  IL12A(23-219) mRNA product opt8
gggagaaagcuuacccgcaaucuccccgucgccacccccgaccccggaauguuucccugccuccaccacucacaaaaccuccuacgcgccgucucaaacaugcuucaaaaagcccgacaaacccucgaauuuuaccccugcaccuccgaagaaaucgaccacgaagacauaaccaaagacaaaaccuccaccgucgaagccugccuaccauuagaacuaaccaaaaacgaauccugccucaacucacgcgaaaccuccuucaucacaaacggcucaugccucgccucacgcaaaaccuccuucaugauggcccucugccuaucaucaaucuaugaagaccucaaaauguaccaaguagaauuuaaaaccaugaacgccaaacuccucauggaccccaaacgccaaaucuuccucgaccaaaacaugcucgcagucaucgacgaacucaugcaagcccucaacuucaacucagaaacagucccacaaaaauccucccucgaagaacccgacuucuauaaaaccaaaaucaaacucugcauccuccuccacgccuuccgcauacgcgccguaaccaucgaccgcguaaugucauaccuaaaugccucuuaaggacuaguuauaagacugacuagcccgaugggccucccaacgggcccuccuccccuccuugcaccgagauuaauaaaaaaaaaaaaaaaaaaaaaaaaaaaaaaaaaaaaaaaaaaaaaaaaaaaaaaaaaaaaaaaaugcaucccccccccccccccccccccccccccccccaaaggcucuuuucagagccaccagaauu

SEQ ID NO: 248 - RNA, 1204 nt, Artificial Sequence
  IL12B mRNA product opt8
gggagaaagcuuaccaugugccaccaacaacucgucauaagcugguucagccuaguauuccucgccucaccccucgucgccaucugggaacucaagaaagacguauacgucgucgaacuagacugguaccccgacgcacccggagaaaugguaguacucacaugcgacacccccgaagaagacggcaucacauggaccuuagaccaaucaucagaaguccucggauccggaaaaacccucacaauccaagucaaagaguucggcgacgccggccaauacacaugccacaaaggcggagaaguccucucacacucacuccuucuacuacacaagaaagaagacggcaucugguccaccgacauacucaaagaccaaaaagaacccaaaaacaaaaccuuccuccgcugcgaagccaaaaacuacuccggccgauucacaugcugguggcucaccaccaucuccaccgaccugaccuucuccgucaaauccagcaggggcuccucagacccacaaggcguaaccugcggcgcagccacccuaucggccgaacgaguccgcggagacaacaaagaauacgaauacagcgucgaaugccaagaagacucagcaugcccagcagccgaagaaucacuccccaucgaagucauggucgacgccguccacaaacuaaaauacgaaaacuacacaagcucauucuucauccgcgacauaaucaaacccgacccaccgaaaaaccuccaacucaaaccccuuaaaaacagccgccaagucgaagucuccugggaauaccccgacaccugguccacaccccacuccuacuucucacucaccuucugcguccaaguccaaggcaaauccaaacgcgaaaagaaagaccgcguauucaccgacaaaaccuccgccacagucaucugccgcaaaaacgccucaaucuccguccgcgcccaagaccgauacuacagcuccuccuggucagaaugggccuccgucccaugcuccuaaggacuaguuauaagacugacuagcccgaugggccucccaacgggcccuccuccccuccuugcaccgagauuaauaaaaaaaaaaaaaaaaaaaaaaaaaaaaaaaaaaaaaaaaaaaaaaaaaaaaaaaaaaaaaaaaugcaucccccccccccccccccccccccccccccccaaaggcucuuuucagagccaccagaauu

SEQ ID NO: 249 - RNA, 1201 nt, Artificial Sequence
  IL12B(1-328) mRNA product opt8
gggagaaagcuuaccaugugccaccaacaacucgucauaagcugguucagccuaguauuccucgccucaccccucgucgccaucugggaacucaagaaagacguauacgucgucgaacuagacugguaccccgacgcacccggagaaaugguaguacucacaugcgacacccccgaagaagacggcaucacauggaccuuagaccaaucaucagaaguccucggauccggaaaaacccucacaauccaagucaaagaguucggcgacgccggccaauacacaugccacaaaggcggagaaguccucucacacucacuccuucuacuacacaagaaagaagacggcaucugguccaccgacauacucaaagaccaaaaagaacccaaaaacaaaaccuuccuccgcugcgaagccaaaaacuacuccggccgauucacaugcugguggcucaccaccaucuccaccgaccugaccuucuccgucaaauccagcaggggcuccucagacccacaaggcguaaccugcggcgcagccacccuaucggccgaacgaguccgcggagacaacaaagaauacgaauacagcgucgaaugccaagaagacucagcaugcccagcagccgaagaaucacuccccaucgaagucauggucgacgccguccacaaacuaaaauacgaaaacuacacaagcucauucuucauccgcgacauaaucaaacccgacccaccgaaaaaccuccaacucaaaccccuuaaaaacagccgccaagucgaagucuccugggaauaccccgacaccugguccacaccccacuccuacuucucacucaccuucugcguccaaguccaaggcaaauccaaacgcgaaaagaaagaccgcguauucaccgacaaaaccuccgccacagucaucugccgcaaaaacgccucaaucuccguccgcgcccaagaccgauacuacagcuccuccuggucagaaugggccuccgucccaugcuccggacuaguuauaagacugacuagcccgaugggccucccaacgggcccuccuccccuccuugcaccgagauuaauaaaaaaaaaaaaaaaaaaaaaaaaaaaaaaaaaaaaaaaaaaaaaaaaaaaaaaaaaaaaaaaaugcaucccccccccccccccccccccccccccccccaaaggcucuuuucagagccaccagaauu

SEQ ID NO: 250 - RNA, 1138 nt, Artificial Sequence
  IL12B(23-328) mRNA product opt8
gggagaaagcuuaccaucugggaacucaagaaagacguauacgucgucgaacuagacugguaccccgacgcacccggagaaaugguaguacucacaugcgacacccccgaagaagacggcaucacauggaccuuagaccaaucaucagaaguccucggauccggaaaaacccucacaauccaagucaaagaguucggcgacgccggccaauacacaugccacaaaggcggagaaguccucucacacucacuccuucuacuacacaagaaagaagacggcaucugguccaccgacauacucaaagaccaaaaagaacccaaaaacaaaaccuuccuccgcugcgaagccaaaaacuacuccggccgauucacaugcugguggcucaccaccaucuccaccgaccugaccuucuccgucaaauccagcaggggcuccucagacccacaaggcguaaccugcggcgcagccacccuaucggccgaacgaguccgcggagacaacaaagaauacgaauacagcgucgaaugccaagaagacucagcaugcccagcagccgaagaaucacuccccaucgaagucauggucgacgccguccacaaacuaaaauacgaaaacuacacaagcucauucuucauccgcgacauaaucaaacccgacccaccgaaaaaccuccaacucaaaccccuuaaaaacagccgccaagucgaagucuccugggaauaccccgacaccugguccacaccccacuccuacuucucacucaccuucugcguccaaguccaaggcaaauccaaacgcgaaaagaaagaccgcguauucaccgacaaaaccuccgccacagucaucugccgcaaaaacgccucaaucuccguccgcgcccaagaccgauacuacagcuccuccuggucagaaugggccuccgucccaugcuccuaaggacuaguuauaagacugacuagcccgaugggccucccaacgggcccuccuccccuccuugcaccgagauuaauaaaaaaaaaaaaaaaaaaaaaaaaaaaaaaaaaaaaaaaaaaaaaaaaaaaaaaaaaaaaaaaaugcaucccccccccccccccccccccccccccccccaaaggcucuuuucagagccaccagaauu

SEQ ID NO: 251 - RNA, 271 nt, Artificial Sequence
  Linker-sFvCC49-218 mRNA product opt8
gggagaaagcuuaccgggagcacgagcgggagcgggaagccgggaaguggagagggaaguacaaagggaggacuaguuauaagacugacuagcccgaugggccucccaacgggcccuccuccccuccuugcaccgagauuaauaaaaaaaaaaaaaaaaaaaaaaaaaaaaaaaaaaaaaaaaaaaaaaaaaaaaaaaaaaaaaaaaugcaucccccccccccccccccccccccccccccccaaaggcucuuuucagagccaccagaauu

SEQ ID NO: 252 - RNA, 1849 nt, Artificial Sequence
  IL12 mRNA product opt8
gggagaaagcuuaccaugugccaccaacaacucgucauaagcugguucagccuaguauuccucgccucaccccucgucgccaucugggaacucaagaaagacguauacgucgucgaacuagacugguaccccgacgcacccggagaaaugguaguacucacaugcgacacccccgaagaagacggcaucacauggaccuuagaccaaucaucagaaguccucggauccggaaaaacccucacaauccaagucaaagaguucggcgacgccggccaauacacaugccacaaaggcggagaaguccucucacacucacuccuucuacuacacaagaaagaagacggcaucugguccaccgacauacucaaagaccaaaaagaacccaaaaacaaaaccuuccuccgcugcgaagccaaaaacuacuccggccgauucacaugcugguggcucaccaccaucuccaccgaccugaccuucuccgucaaauccagcaggggcuccucagacccacaaggcguaaccugcggcgcagccacccuaucggccgaacgaguccgcggagacaacaaagaauacgaauacagcgucgaaugccaagaagacucagcaugcccagcagccgaagaaucacuccccaucgaagucauggucgacgccguccacaaacuaaaauacgaaaacuacacaagcucauucuucauccgcgacauaaucaaacccgacccaccgaaaaaccuccaacucaaaccccuuaaaaacagccgccaagucgaagucuccugggaauaccccgacaccugguccacaccccacuccuacuucucacucaccuucugcguccaaguccaaggcaaauccaaacgcgaaaagaaagaccgcguauucaccgacaaaaccuccgccacagucaucugccgcaaaaacgccucaaucuccguccgcgcccaagaccgauacuacagcuccuccuggucagaaugggccuccgucccaugcuccgggagcacgagcgggagcgggaagccgggaaguggagagggaaguacaaagggacgcaaucuccccgucgccacccccgaccccggaauguuucccugccuccaccacucacaaaaccuccuacgcgccgucucaaacaugcuucaaaaagcccgacaaacccucgaauuuuaccccugcaccuccgaagaaaucgaccacgaagacauaaccaaagacaaaaccuccaccgucgaagccugccuaccauuagaacuaaccaaaaacgaauccugccucaacucacgcgaaaccuccuucaucacaaacggcucaugccucgccucacgcaaaaccuccuucaugauggcccucugccuaucaucaaucuaugaagaccucaaaauguaccaaguagaauuuaaaaccaugaacgccaaacuccucauggaccccaaacgccaaaucuuccucgaccaaaacaugcucgcagucaucgacgaacucaugcaagcccucaacuucaacucagaaacagucccacaaaaauccucccucgaagaacccgacuucuauaaaaccaaaaucaaacucugcauccuccuccacgccuuccgcauacgcgccguaaccaucgaccgcguaaugucauaccuaaaugccucuuaaggacuaguuauaagacugacuagcccgaugggccucccaacgggcccuccuccccuccuugcaccgagauuaauaaaaaaaaaaaaaaaaaaaaaaaaaaaaaaaaaaaaaaaaaaaaaaaaaaaaaaaaaaaaaaaaugcaucccccccccccccccccccccccccccccccaaaggcucuuuucagagccaccagaauu

SEQ ID NO: 253 - RNA, 1003 nt, Artificial Sequence
  CD40LG mRNA product opt8
gggagaaagcuuaccaugauagaaaccuacaaccaaaccucuccccgauccgcagccaccggccuccccaucuccaugaaaaucuucauguaccuccuaaccgucuuccuaaucacucaaaugaucggcuccgcucucuucgcagucuaccuccaccgccgccuagacaaaaucgaagacgaacgcaaccuacacgaagacuucgucuucaugaaaaccauucaacgcugcaacacaggcgaacgaucccuaucccuacucaacugcgaagaaaucaaaucccaauucgaaggcuuuguaaaagacaucaugcucaacaaagaagaaaccaaaaaagaaaacuccuucgaaaugcaaaaaggcgaccaaaacccccaaauagccgcccaugucauaucagaagccuccuccaaaaccaccuccguccuccaaugggccgaaaaaggcuacuacaccauguccaacaaccuaguaacccuugaaaacggcaaacaacucaccguaaaacgccaaggccucuacuacaucuacgcccaagucaccuucugcuccaacagagaagcauccucccaagcacccuucaucgccucccuaugccucaaaucccccggccgcuucgaacgaauccuccuccgcgccgccaacacucacuccucagccaaacccugcggccaacaaaguauacaccuuggcggagucuucgaacuccaacccggcgccuccgucuucguaaacgucaccgaccccucacaagucucccacggaaccggauucaccuccuucggccuacuaaaacuauagggacuaguuauaagacugacuagcccgaugggccucccaacgggcccuccuccccuccuugcaccgagauuaauaaaaaaaaaaaaaaaaaaaaaaaaaaaaaaaaaaaaaaaaaaaaaaaaaaaaaaaaaaaaaaaaugcaucccccccccccccccccccccccccccccccaaaggcucuuuucagagccaccagaauu

SEQ ID NO: 254 - RNA, 1084 nt, Artificial Sequence
  PDCD1 mRNA product opt9
gggagaaagcuuaccaugcaaaucccccaagccccauggcccgucgucugggccguccuccaacucggcuggcgccccggaugguuccuagacucuccagaccgccccuggaauccacccaccuucucccccgcccuccuagucgucaccgaaggcgacaacgccaccuucaccuguucauucuccaacaccucagaauccuucguacucaacugguaccgcauguccccaagcaaccaaacagacaaacucgccgccuuccccgaagaccgcucccaacccggucaagacugccgauuccgcgucacccaacuccccaacggacgcgacuuccacauguccgucguucgagcacgacgcaacgacucaggcacauaccuaugcggagccaucucccuagcccccaaagcccaaaucaaagaaucacuacgcgccgaacuccgcgucaccgaacgccgcgccgaaguacccacagcccacccauccccaucaccacgcccagcaggucaauuccaaaccuuagucgucggagucgucggcggccuccuaggcucacucguccuccuagucuggguccucgccgucauaugcagccgcgccgcacgcggcaccaucggcgccagacgcaccggacaaccccucaaagaagaccccucagccguccccgucuuuuccgucgacuacggcgaacuagacuuccaauggcgcgaaaaaacccccgaaccccccgucccaugcguacccgaacaaaccgaauacgccacaauagucuucccauccggcaugggaaccucaucacccgccagacgaggcucagcagauggcccccgcuccgcacaaccacuccgaccagaagacggccacugcagcuggccccuguaaggacuaguuauaagacugacuagcccgaugggccucccaacgggcccuccuccccuccuugcaccgagauuaauaaaaaaaaaaaaaaaaaaaaaaaaaaaaaaaaaaaaaaaaaaaaaaaaaaaaaaaaaaaaaaaaugcaucccccccccccccccccccccccccccccccaaaggcucuuuucagagccaccagaauu

SEQ ID NO: 255 - RNA, 667 nt, Artificial Sequence
  PDCD1(1-149) mRNA product opt9
gggagaaagcuuaccaugcaaaucccccaagccccauggcccgucgucugggccguccuccaacucggcuggcgccccggaugguuccuagacucuccagaccgccccuggaauccacccaccuucucccccgcccuccuagucgucaccgaaggcgacaacgccaccuucaccuguucauucuccaacaccucagaauccuucguacucaacugguaccgcauguccccaagcaaccaaacagacaaacucgccgccuuccccgaagaccgcucccaacccggucaagacugccgauuccgcgucacccaacuccccaacggacgcgacuuccacauguccgucguucgagcacgacgcaacgacucaggcacauaccuaugcggagccaucucccuagcccccaaagcccaaaucaaagaaucacuacgcgccgaacuccgcgucaccgaacgccgcgccuaaggacuaguuauaagacugacuagcccgaugggccucccaacgggcccuccuccccuccuugcaccgagauuaauaaaaaaaaaaaaaaaaaaaaaaaaaaaaaaaaaaaaaaaaaaaaaaaaaaaaaaaaaaaaaaaaugcaucccccccccccccccccccccccccccccccaaaggcucuuuucagagccaccagaauu

SEQ ID NO: 256 - RNA, 877 nt, Artificial Sequence
  IL12A mRNA product opt9
gggagaaagcuuaccaugugccccgccagaucccuccuccucgucgcaacccucguccuccucgaccaccucucccuagcacguaaccucccagucgccaccccagaccccggaauguuccccugccuccaucacucccaaaaucuccuccgugccgucuccaacaugcuccaaaaagcccgccaaacccucgaauuuuauccaugcaccuccgaagaaauagaccaugaagacaucaccaaagacaaaacauccaccgucgaagccugccucccccucgaacucacaaaaaacgaaucaugccucaacucccgcgaaaccuccuucauaaccaacggcucaugccucgccucucgcaaaaccucauucaugauggcccucugccuauccucuaucuacgaagaccucaaaauguaccaagucgaauuuaaaaccaugaacgccaaacuccucauggaccccaaacgccaaaucuuccucgaccaaaacaugcucgcagucaucgacgaacucaugcaagcacucaacuucaacucagaaaccgucccccaaaaauccucccucgaagaacccgacuucuacaaaacaaaaauaaaacucugcauccuccuccacgccuuccgcauccgagcagucaccaucgaucgcgucauguccuaccuaaacgccuccuaaggacuaguuauaagacugacuagcccgaugggccucccaacgggcccuccuccccuccuugcaccgagauuaauaaaaaaaaaaaaaaaaaaaaaaaaaaaaaaaaaaaaaaaaaaaaaaaaaaaaaaaaaaaaaaaaugcaucccccccccccccccccccccccccccccccaaaggcucuuuucagagccaccagaauu

SEQ ID NO: 257 - RNA, 874 nt, Artificial Sequence
  IL12A(1-219) mRNA product opt9
gggagaaagcuuaccaugugccccgccagaucccuccuccucgucgcaacccucguccuccucgaccaccucucccuagcacguaaccucccagucgccaccccagaccccggaauguuccccugccuccaucacucccaaaaucuccuccgugccgucuccaacaugcuccaaaaagcccgccaaacccucgaauuuuauccaugcaccuccgaagaaauagaccaugaagacaucaccaaagacaaaacauccaccgucgaagccugccucccccucgaacucacaaaaaacgaaucaugccucaacucccgcgaaaccuccuucauaaccaacggcucaugccucgccucucgcaaaaccucauucaugauggcccucugccuauccucuaucuacgaagaccucaaaauguaccaagucgaauuuaaaaccaugaacgccaaacuccucauggaccccaaacgccaaaucuuccucgaccaaaacaugcucgcagucaucgacgaacucaugcaagcacucaacuucaacucagaaaccgucccccaaaaauccucccucgaagaacccgacuucuacaaaacaaaaauaaaacucugcauccuccuccacgccuuccgcauccgagcagucaccaucgaucgcgucauguccuaccuaaacgccuccggacuaguuauaagacugacuagcccgaugggccucccaacgggcccuccuccccuccuugcaccgagauuaauaaaaaaaaaaaaaaaaaaaaaaaaaaaaaaaaaaaaaaaaaaaaaaaaaaaaaaaaaaaaaaaaugcaucccccccccccccccccccccccccccccccaaaggcucuuuucagagccaccagaauu

SEQ ID NO: 258 - RNA, 811 nt, Artificial Sequence
  IL12A(23-219) mRNA product opt9
gggagaaagcuuacccguaaccucccagucgccaccccagaccccggaauguuccccugccuccaucacucccaaaaucuccuccgugccgucuccaacaugcuccaaaaagcccgccaaacccucgaauuuuauccaugcaccuccgaagaaauagaccaugaagacaucaccaaagacaaaacauccaccgucgaagccugccucccccucgaacucacaaaaaacgaaucaugccucaacucccgcgaaaccuccuucauaaccaacggcucaugccucgccucucgcaaaaccucauucaugauggcccucugccuauccucuaucuacgaagaccucaaaauguaccaagucgaauuuaaaaccaugaacgccaaacuccucauggaccccaaacgccaaaucuuccucgaccaaaacaugcucgcagucaucgacgaacucaugcaagcacucaacuucaacucagaaaccgucccccaaaaauccucccucgaagaacccgacuucuacaaaacaaaaauaaaacucugcauccuccuccacgccuuccgcauccgagcagucaccaucgaucgcgucauguccuaccuaaacgccuccuaaggacuaguuauaagacugacuagcccgaugggccucccaacgggcccuccuccccuccuugcaccgagauuaauaaaaaaaaaaaaaaaaaaaaaaaaaaaaaaaaaaaaaaaaaaaaaaaaaaaaaaaaaaaaaaaaugcaucccccccccccccccccccccccccccccccaaaggcucuuuucagagccaccagaauu

SEQ ID NO: 259 - RNA, 1204 nt, Artificial Sequence
  IL12B mRNA product opt9
gggagaaagcuuaccaugugucaccaacaacuuguaaucagcugguucucccucgucuuccucgccucaccccucgucgccaucugggaacucaaaaaagacgucuacguagucgaacucgacugguaccccgacgccccaggagaaauggucguacucaccugugacacccccgaagaagacggcaucaccuggacccucgaccaauccuccgaaguccucgguucaggaaaaacccucaccauccaaguaaaagaauuuggcgacgccgggcaauauaccugccacaaaggcggcgagguccuaucccacucacuccuccuccuccacaagaaagaagacggaaucugguccaccgacauccuuaaagaccaaaaagaaccaaaaaacaaaacauuccuccgcugcgaagccaaaaacuacagcggccgcuucaccuguugguggcuaaccacaauaucaaccgacuuaaccuucagcgucaaauccuccagaggauccagcgacccacaaggaguuaccugcggagccgcaacacucagcgccgaacgaguccgcggagacaacaaagaauacgaauacuccgucgaaugccaagaagacucagcaugccccgccgcagaagaaucccuacccaucgaaguaaugguagacgccguccacaaacucaaauacgaaaacuacaccagcuccuucuucauccgagacaucaucaaacccgaccccccaaaaaaccuccaacuaaaaccccucaaaaacagccgccaaguagaaguauccugggaauaccccgacaccugguccacaccccacuccuacuucucgcucacguucugcguccaaguccaaggcaaauccaaacgagaaaaaaaagaccgcgucuucaccgacaaaacuuccgccaccgucaucugccgcaaaaacgccagcaucagcguccgcgcacaagaccgcuacuacucaagcuccugguccgaaugggccuccgucccaugcucauaaggacuaguuauaagacugacuagcccgaugggccucccaacgggcccuccuccccuccuugcaccgagauuaauaaaaaaaaaaaaaaaaaaaaaaaaaaaaaaaaaaaaaaaaaaaaaaaaaaaaaaaaaaaaaaaaugcaucccccccccccccccccccccccccccccccaaaggcucuuuucagagccaccagaauu

SEQ ID NO: 260 - RNA, 1201 nt, Artificial Sequence
  IL12B(1-328) mRNA product opt9
gggagaaagcuuaccaugugucaccaacaacuuguaaucagcugguucucccucgucuuccucgccucaccccucgucgccaucugggaacucaaaaaagacgucuacguagucgaacucgacugguaccccgacgccccaggagaaauggucguacucaccugugacacccccgaagaagacggcaucaccuggacccucgaccaauccuccgaaguccucgguucaggaaaaacccucaccauccaaguaaaagaauuuggcgacgccgggcaauauaccugccacaaaggcggcgagguccuaucccacucacuccuccuccuccacaagaaagaagacggaaucugguccaccgacauccuuaaagaccaaaaagaaccaaaaaacaaaacauuccuccgcugcgaagccaaaaacuacagcggccgcuucaccuguugguggcuaaccacaauaucaaccgacuuaaccuucagcgucaaauccuccagaggauccagcgacccacaaggaguuaccugcggagccgcaacacucagcgccgaacgaguccgcggagacaacaaagaauacgaauacuccgucgaaugccaagaagacucagcaugccccgccgcagaagaaucccuacccaucgaaguaaugguagacgccguccacaaacucaaauacgaaaacuacaccagcuccuucuucauccgagacaucaucaaacccgaccccccaaaaaaccuccaacuaaaaccccucaaaaacagccgccaaguagaaguauccugggaauaccccgacaccugguccacaccccacuccuacuucucgcucacguucugcguccaaguccaaggcaaauccaaacgagaaaaaaaagaccgcgucuucaccgacaaaacuuccgccaccgucaucugccgcaaaaacgccagcaucagcguccgcgcacaagaccgcuacuacucaagcuccugguccgaaugggccuccgucccaugcucaggacuaguuauaagacugacuagcccgaugggccucccaacgggcccuccuccccuccuugcaccgagauuaauaaaaaaaaaaaaaaaaaaaaaaaaaaaaaaaaaaaaaaaaaaaaaaaaaaaaaaaaaaaaaaaaugcaucccccccccccccccccccccccccccccccaaaggcucuuuucagagccaccagaauu

SEQ ID NO: 261 - RNA, 1138 nt, Artificial Sequence
  IL12B(23-328) mRNA product opt9
gggagaaagcuuaccaucugggaacucaaaaaagacgucuacguagucgaacucgacugguaccccgacgccccaggagaaauggucguacucaccugugacacccccgaagaagacggcaucaccuggacccucgaccaauccuccgaaguccucgguucaggaaaaacccucaccauccaaguaaaagaauuuggcgacgccgggcaauauaccugccacaaaggcggcgagguccuaucccacucacuccuccuccuccacaagaaagaagacggaaucugguccaccgacauccuuaaagaccaaaaagaaccaaaaaacaaaacauuccuccgcugcgaagccaaaaacuacagcggccgcuucaccuguugguggcuaaccacaauaucaaccgacuuaaccuucagcgucaaauccuccagaggauccagcgacccacaaggaguuaccugcggagccgcaacacucagcgccgaacgaguccgcggagacaacaaagaauacgaauacuccgucgaaugccaagaagacucagcaugccccgccgcagaagaaucccuacccaucgaaguaaugguagacgccguccacaaacucaaauacgaaaacuacaccagcuccuucuucauccgagacaucaucaaacccgaccccccaaaaaaccuccaacuaaaaccccucaaaaacagccgccaaguagaaguauccugggaauaccccgacaccugguccacaccccacuccuacuucucgcucacguucugcguccaaguccaaggcaaauccaaacgagaaaaaaaagaccgcgucuucaccgacaaaacuuccgccaccgucaucugccgcaaaaacgccagcaucagcguccgcgcacaagaccgcuacuacucaagcuccugguccgaaugggccuccgucccaugcucauaaggacuaguuauaagacugacuagcccgaugggccucccaacgggcccuccuccccuccuugcaccgagauuaauaaaaaaaaaaaaaaaaaaaaaaaaaaaaaaaaaaaaaaaaaaaaaaaaaaaaaaaaaaaaaaaaugcaucccccccccccccccccccccccccccccccaaaggcucuuuucagagccaccagaauu

SEQ ID NO: 262 - RNA, 271 nt, Artificial Sequence
  Linker-sFvCC49-218 mRNA product opt9
gggagaaagcuuaccgggaguacgagugggagugggaagccggggaguggggaggggaguacgaaggggggacuaguuauaagacugacuagcccgaugggccucccaacgggcccuccuccccuccuugcaccgagauuaauaaaaaaaaaaaaaaaaaaaaaaaaaaaaaaaaaaaaaaaaaaaaaaaaaaaaaaaaaaaaaaaaugcaucccccccccccccccccccccccccccccccaaaggcucuuuucagagccaccagaauu

SEQ ID NO: 263 - RNA, 1849 nt, Artificial Sequence
  IL12 mRNA product opt9
gggagaaagcuuaccaugugucaccaacaacuuguaaucagcugguucucccucgucuuccucgccucaccccucgucgccaucugggaacucaaaaaagacgucuacguagucgaacucgacugguaccccgacgccccaggagaaauggucguacucaccugugacacccccgaagaagacggcaucaccuggacccucgaccaauccuccgaaguccucgguucaggaaaaacccucaccauccaaguaaaagaauuuggcgacgccgggcaauauaccugccacaaaggcggcgagguccuaucccacucacuccuccuccuccacaagaaagaagacggaaucugguccaccgacauccuuaaagaccaaaaagaaccaaaaaacaaaacauuccuccgcugcgaagccaaaaacuacagcggccgcuucaccuguugguggcuaaccacaauaucaaccgacuuaaccuucagcgucaaauccuccagaggauccagcgacccacaaggaguuaccugcggagccgcaacacucagcgccgaacgaguccgcggagacaacaaagaauacgaauacuccgucgaaugccaagaagacucagcaugccccgccgcagaagaaucccuacccaucgaaguaaugguagacgccguccacaaacucaaauacgaaaacuacaccagcuccuucuucauccgagacaucaucaaacccgaccccccaaaaaaccuccaacuaaaaccccucaaaaacagccgccaaguagaaguauccugggaauaccccgacaccugguccacaccccacuccuacuucucgcucacguucugcguccaaguccaaggcaaauccaaacgagaaaaaaaagaccgcgucuucaccgacaaaacuuccgccaccgucaucugccgcaaaaacgccagcaucagcguccgcgcacaagaccgcuacuacucaagcuccugguccgaaugggccuccgucccaugcucagggaguacgagugggagugggaagccggggaguggggaggggaguacgaaggggcguaaccucccagucgccaccccagaccccggaauguuccccugccuccaucacucccaaaaucuccuccgugccgucuccaacaugcuccaaaaagcccgccaaacccucgaauuuuauccaugcaccuccgaagaaauagaccaugaagacaucaccaaagacaaaacauccaccgucgaagccugccucccccucgaacucacaaaaaacgaaucaugccucaacucccgcgaaaccuccuucauaaccaacggcucaugccucgccucucgcaaaaccucauucaugauggcccucugccuauccucuaucuacgaagaccucaaaauguaccaagucgaauuuaaaaccaugaacgccaaacuccucauggaccccaaacgccaaaucuuccucgaccaaaacaugcucgcagucaucgacgaacucaugcaagcacucaacuucaacucagaaaccgucccccaaaaauccucccucgaagaacccgacuucuacaaaacaaaaauaaaacucugcauccuccuccacgccuuccgcauccgagcagucaccaucgaucgcgucauguccuaccuaaacgccuccuaaggacuaguuauaagacugacuagcccgaugggccucccaacgggcccuccuccccuccuugcaccgagauuaauaaaaaaaaaaaaaaaaaaaaaaaaaaaaaaaaaaaaaaaaaaaaaaaaaaaaaaaaaaaaaaaaugcaucccccccccccccccccccccccccccccccaaaggcucuuuucagagccaccagaauu

SEQ ID NO: 264 - RNA, 1003 nt, Artificial Sequence
  CD40LG mRNA product opt9
gggagaaagcuuaccaugaucgaaacauacaaccaaacauccccccgcuccgccgccacaggccuccccaucuccaugaaaaucuucauguaccuccucacaguauuccucaucacccaaaugaucggcuccgcacucuuugcagucuaucuccaccgucgccucgacaaaaucgaagacgaacgcaaccuccacgaagacuucgucuucaugaaaaccauacaacgcugcaacaccggcgaacgcucacucucccuacuaaacugcgaagaaaucaaaucccaauucgaaggcuucgucaaagacaucaugcuaaacaaagaagaaacaaaaaaagaaaacuccuucgaaaugcaaaaaggcgaccaaaacccccaaauagccgcccacgucaucuccgaagccuccuccaaaaccaccuccguccuccaaugggccgaaaaaggcuacuacacaauguccaacaaccucgucacccucgaaaacggcaaacaacucaccgucaaacgccaaggccucuacuacaucuacgcccaaguaaccuucugcuccaaccgcgaagccucaucucaagcucccuucaucgccucacucugccucaaaucacccggccgcuucgaaagaauccuccuccgcgccgcaaacacccacucauccgccaaacccugcggccaacaauccauacaccucggcggcguuuucgagcuccaaccuggcgccuccgucuucguaaacgucaccgaccccucacaagucucccacgguaccggcuucaccuccuucggacuccuaaaacucuaaggacuaguuauaagacugacuagcccgaugggccucccaacgggcccuccuccccuccuugcaccgagauuaauaaaaaaaaaaaaaaaaaaaaaaaaaaaaaaaaaaaaaaaaaaaaaaaaaaaaaaaaaaaaaaaaugcaucccccccccccccccccccccccccccccccaaaggcucuuuucagagccaccagaauu

SEQ ID NO: 265 - RNA, 1084 nt, Artificial Sequence
  PDCD1 mRNA product opt10
gggagaaagcuuaccaugcaaaucccccaagcccccuggccggucgucugggccguccuccaacucggcuggcgccccggaugguuccucgacucccccgaccgcccguggaacccccccaccuucucccccgcccuccuagucgucaccgaaggcgacaacgccaccuucaccuguuccuucuccaacaccucagaauccuucguccucaacugguaccgcaugucccccuccaaccaaaccgacaaacucgccgccuuccccgaagaccgaucccaacccggccaagacugccgcuuccgcgucacacaacuucccaacggacgcgacuuucacauguccgucguccgcgcccgccgcaacgacuccggcaccuaccucugcggcgccaucucccucgcccccaaagcccaaaucaaagaaucccucagagccgaacuccgcgucaccgaacggcgcgccgaaguccccacugcccaccccucccccuccccccgccccgccggccaauuccaaacccucgucgucggcguugucggcggccuccucggcucacucguccuccucgucuggguacucgccgucaucugcucccgcgccgcgcgcggcaccaucggcgcgcgccgcaccggacaaccccuaaaagaagaccccuccgccguccccgucuucuccgucgacuacggcgaacucgacuuccaauggcgcgaaaaaaccccggaaccccccgucccgugcguccccgaacaaacagaauacgcgaccaucgucuucccguccggcaugggcacauccucacccgcccgccgaggcuccgccgacggcccccgauccgcccaaccccuacgccccgaagacggccacugcuccuggccccucuaaggacuaguuauaagacugacuagcccgaugggccucccaacgggcccuccuccccuccuugcaccgagauuaauaaaaaaaaaaaaaaaaaaaaaaaaaaaaaaaaaaaaaaaaaaaaaaaaaaaaaaaaaaaaaaaaugcaucccccccccccccccccccccccccccccccaaaggcucuuuucagagccaccagaauu

SEQ ID NO: 266 - RNA, 667 nt, Artificial Sequence
  PDCD1(1-149) mRNA product opt10
gggagaaagcuuaccaugcaaaucccccaagcccccuggccggucgucugggccguccuccaacucggcuggcgccccggaugguuccucgacucccccgaccgcccguggaacccccccaccuucucccccgcccuccuagucgucaccgaaggcgacaacgccaccuucaccuguuccuucuccaacaccucagaauccuucguccucaacugguaccgcaugucccccuccaaccaaaccgacaaacucgccgccuuccccgaagaccgaucccaacccggccaagacugccgcuuccgcgucacacaacuucccaacggacgcgacuuucacauguccgucguccgcgcccgccgcaacgacuccggcaccuaccucugcggcgccaucucccucgcccccaaagcccaaaucaaagaaucccucagagccgaacuccgcgucaccgaacggcgcgccuaaggacuaguuauaagacugacuagcccgaugggccucccaacgggcccuccuccccuccuugcaccgagauuaauaaaaaaaaaaaaaaaaaaaaaaaaaaaaaaaaaaaaaaaaaaaaaaaaaaaaaaaaaaaaaaaaugcaucccccccccccccccccccccccccccccccaaaggcucuuuucagagccaccagaauu

SEQ ID NO: 267 - RNA, 877 nt, Artificial Sequence
  IL12A mRNA product opt10
gggagaaagcuuaccaugugccccgcccguucacuccuccucgucgccacccucguccuccuagaccaccucucccuggcccgcaaccucccagucgccacccccgaccccggcauguuccccugccuccaccacucccaaaaccuccuccgcgccgucuccaacaugcuccaaaaagcccgccaaacccucgaauuuuaccccugcaccuccgaagagaucgaccacgaagacaucaccaaagacaaaaccuccacagucgaagccugccucccccucgaacucaccaaaaacgaauccugccuuaacucccgcgaaaccuccuucaucaccaacggcuccugccucgccucccgcaaaaccuccuucaugauggcccucugccucuccuccaucuacgaagaccucaaaauguaccaagucgaauuuaaaaccaugaacgccaaacuccucauggaccccaaacgccaaaucuuccucgaccaaaacaugcucgccgucaucgacgaacucaugcaagcccucaacuucaacuccgaaaccgucccccaaaaauccucccucgaagaacccgacuucuacaaaaccaaaaucaaacuuugcauccuccuccacgcauuccgcauccgcgccgucaccaucgaccgugucaugagcuaccuaaacgccuccugaggacuaguuauaagacugacuagcccgaugggccucccaacgggcccuccuccccuccuugcaccgagauuaauaaaaaaaaaaaaaaaaaaaaaaaaaaaaaaaaaaaaaaaaaaaaaaaaaaaaaaaaaaaaaaaaugcaucccccccccccccccccccccccccccccccaaaggcucuuuucagagccaccagaauu

SEQ ID NO: 268 - RNA, 874 nt, Artificial Sequence
  IL12A(1-219) mRNA product opt10
gggagaaagcuuaccaugugccccgcccguucacuccuccucgucgccacccucguccuccuagaccaccucucccuggcccgcaaccucccagucgccacccccgaccccggcauguuccccugccuccaccacucccaaaaccuccuccgcgccgucuccaacaugcuccaaaaagcccgccaaacccucgaauuuuaccccugcaccuccgaagagaucgaccacgaagacaucaccaaagacaaaaccuccacagucgaagccugccucccccucgaacucaccaaaaacgaauccugccuuaacucccgcgaaaccuccuucaucaccaacggcuccugccucgccucccgcaaaaccuccuucaugauggcccucugccucuccuccaucuacgaagaccucaaaauguaccaagucgaauuuaaaaccaugaacgccaaacuccucauggaccccaaacgccaaaucuuccucgaccaaaacaugcucgccgucaucgacgaacucaugcaagcccucaacuucaacuccgaaaccgucccccaaaaauccucccucgaagaacccgacuucuacaaaaccaaaaucaaacuuugcauccuccuccacgcauuccgcauccgcgccgucaccaucgaccgugucaugagcuaccuaaacgccuccggacuaguuauaagacugacuagcccgaugggccucccaacgggcccuccuccccuccuugcaccgagauuaauaaaaaaaaaaaaaaaaaaaaaaaaaaaaaaaaaaaaaaaaaaaaaaaaaaaaaaaaaaaaaaaaugcaucccccccccccccccccccccccccccccccaaaggcucuuuucagagccaccagaauu

SEQ ID NO: 269 - RNA, 811 nt, Artificial Sequence
  IL12A(23-219) mRNA product opt10
gggagaaagcuuacccgcaaccucccagucgccacccccgaccccggcauguuccccugccuccaccacucccaaaaccuccuccgcgccgucuccaacaugcuccaaaaagcccgccaaacccucgaauuuuaccccugcaccuccgaagagaucgaccacgaagacaucaccaaagacaaaaccuccacagucgaagccugccucccccucgaacucaccaaaaacgaauccugccuuaacucccgcgaaaccuccuucaucaccaacggcuccugccucgccucccgcaaaaccuccuucaugauggcccucugccucuccuccaucuacgaagaccucaaaauguaccaagucgaauuuaaaaccaugaacgccaaacuccucauggaccccaaacgccaaaucuuccucgaccaaaacaugcucgccgucaucgacgaacucaugcaagcccucaacuucaacuccgaaaccgucccccaaaaauccucccucgaagaacccgacuucuacaaaaccaaaaucaaacuuugcauccuccuccacgcauuccgcauccgcgccgucaccaucgaccgugucaugagcuaccuaaacgccuccugaggacuaguuauaagacugacuagcccgaugggccucccaacgggcccuccuccccuccuugcaccgagauuaauaaaaaaaaaaaaaaaaaaaaaaaaaaaaaaaaaaaaaaaaaaaaaaaaaaaaaaaaaaaaaaaaugcaucccccccccccccccccccccccccccccccaaaggcucuuuucagagccaccagaauu

SEQ ID NO: 270 - RNA, 1204 nt, Artificial Sequence
  IL12B mRNA product opt10
gggagaaagcuuaccaugugccaccaacaacucgucaucuccugguucucccucgucuuccuagccuccccacucgucgccaucugggaacucaaaaaagacguauacgucgucgaacucgacugguaccccgacgccccaggagaaauggucguccuaaccugcgacacacccgaagaagacgguaucaccuggacccucgaccaauccuccgaaguccuaggcuccggcaagacccucaccauccaagucaaagaauuuggcgacgcaggacaauacaccugucacaaaggcggcgaaguccucagccacagccuucuccuacuccauaaaaaagaagacggcaucugguccacugacauccucaaagaccaaaaagaacccaaaaauaaaaccuuccuccgcugcgaagccaaaaacuacuccggccgauucaccuguugguggcuaaccacaaucagcaccgaccucaccuucucagucaaauccucccgcggcucaucugacccccaaggcgucacaugcggcgccgccacccucuccgccgaacgcguccgcggcgacaacaaagaauacgaauacuccgucgaaugucaagaagacuccgccugccccgccgccgaagaaucacuccccaucgaagucauggucgacgcaguccacaaacucaaauacgaaaacuacaccuccuccuucuucauccgcgacauaauaaaacccgacccacccaaaaaccuccaacucaagccacucaaaaacucccgacaagucgaagucuccugggaguaccccgacaccugguccacaccacacuccuacuucucccucaccuucugcguccaaguccaaggcaaauccaaacgcgaaaaaaaagaccgcguuuucacagacaaaaccuccgccacaguaauaugccgcaaaaacgccuccaucuccguccgggcccaagaccgcuacuacuccuccuccugguccgagugggccucaguccccugcagcuaaggacuaguuauaagacugacuagcccgaugggccucccaacgggcccuccuccccuccuugcaccgagauuaauaaaaaaaaaaaaaaaaaaaaaaaaaaaaaaaaaaaaaaaaaaaaaaaaaaaaaaaaaaaaaaaaugcaucccccccccccccccccccccccccccccccaaaggcucuuuucagagccaccagaauu

SEQ ID NO: 271 - RNA, 1201 nt, Artificial Sequence
  IL12B(1-328) mRNA product opt10
gggagaaagcuuaccaugugccaccaacaacucgucaucuccugguucucccucgucuuccuagccuccccacucgucgccaucugggaacucaaaaaagacguauacgucgucgaacucgacugguaccccgacgccccaggagaaauggucguccuaaccugcgacacacccgaagaagacgguaucaccuggacccucgaccaauccuccgaaguccuaggcuccggcaagacccucaccauccaagucaaagaauuuggcgacgcaggacaauacaccugucacaaaggcggcgaaguccucagccacagccuucuccuacuccauaaaaaagaagacggcaucugguccacugacauccucaaagaccaaaaagaacccaaaaauaaaaccuuccuccgcugcgaagccaaaaacuacuccggccgauucaccuguugguggcuaaccacaaucagcaccgaccucaccuucucagucaaauccucccgcggcucaucugacccccaaggcgucacaugcggcgccgccacccucuccgccgaacgcguccgcggcgacaacaaagaauacgaauacuccgucgaaugucaagaagacuccgccugccccgccgccgaagaaucacuccccaucgaagucauggucgacgcaguccacaaacucaaauacgaaaacuacaccuccuccuucuucauccgcgacauaauaaaacccgacccacccaaaaaccuccaacucaagccacucaaaaacucccgacaagucgaagucuccugggaguaccccgacaccugguccacaccacacuccuacuucucccucaccuucugcguccaaguccaaggcaaauccaaacgcgaaaaaaaagaccgcguuuucacagacaaaaccuccgccacaguaauaugccgcaaaaacgccuccaucuccguccgggcccaagaccgcuacuacuccuccuccugguccgagugggccucaguccccugcagcggacuaguuauaagacugacuagcccgaugggccucccaacgggcccuccuccccuccuugcaccgagauuaauaaaaaaaaaaaaaaaaaaaaaaaaaaaaaaaaaaaaaaaaaaaaaaaaaaaaaaaaaaaaaaaaugcaucccccccccccccccccccccccccccccccaaaggcucuuuucagagccaccagaauu

SEQ ID NO: 272 - RNA, 1138 nt, Artificial Sequence
  IL12B(23-328) mRNA product opt10
gggagaaagcuuaccaucugggaacucaaaaaagacguauacgucgucgaacucgacugguaccccgacgccccaggagaaauggucguccuaaccugcgacacacccgaagaagacgguaucaccuggacccucgaccaauccuccgaaguccuaggcuccggcaagacccucaccauccaagucaaagaauuuggcgacgcaggacaauacaccugucacaaaggcggcgaaguccucagccacagccuucuccuacuccauaaaaaagaagacggcaucugguccacugacauccucaaagaccaaaaagaacccaaaaauaaaaccuuccuccgcugcgaagccaaaaacuacuccggccgauucaccuguugguggcuaaccacaaucagcaccgaccucaccuucucagucaaauccucccgcggcucaucugacccccaaggcgucacaugcggcgccgccacccucuccgccgaacgcguccgcggcgacaacaaagaauacgaauacuccgucgaaugucaagaagacuccgccugccccgccgccgaagaaucacuccccaucgaagucauggucgacgcaguccacaaacucaaauacgaaaacuacaccuccuccuucuucauccgcgacauaauaaaacccgacccacccaaaaaccuccaacucaagccacucaaaaacucccgacaagucgaagucuccugggaguaccccgacaccugguccacaccacacuccuacuucucccucaccuucugcguccaaguccaaggcaaauccaaacgcgaaaaaaaagaccgcguuuucacagacaaaaccuccgccacaguaauaugccgcaaaaacgccuccaucuccguccgggcccaagaccgcuacuacuccuccuccugguccgagugggccucaguccccugcagcuaaggacuaguuauaagacugacuagcccgaugggccucccaacgggcccuccuccccuccuugcaccgagauuaauaaaaaaaaaaaaaaaaaaaaaaaaaaaaaaaaaaaaaaaaaaaaaaaaaaaaaaaaaaaaaaaaugcaucccccccccccccccccccccccccccccccaaaggcucuuuucagagccaccagaauu

SEQ ID NO: 273 - RNA, 271 nt, Artificial Sequence; identical to SEQ ID NO: 262
  Linker-sFvCC49-218 mRNA product opt10

SEQ ID NO: 274 - RNA, 1849 nt, Artificial Sequence
  IL12 mRNA product opt10
gggagaaagcuuaccaugugccaccaacaacucgucaucuccugguucucccucgucuuccuagccuccccacucgucgccaucugggaacucaaaaaagacguauacgucgucgaacucgacugguaccccgacgccccaggagaaauggucguccuaaccugcgacacacccgaagaagacgguaucaccuggacccucgaccaauccuccgaaguccuaggcuccggcaagacccucaccauccaagucaaagaauuuggcgacgcaggacaauacaccugucacaaaggcggcgaaguccucagccacagccuucuccuacuccauaaaaaagaagacggcaucugguccacugacauccucaaagaccaaaaagaacccaaaaauaaaaccuuccuccgcugcgaagccaaaaacuacuccggccgauucaccuguugguggcuaaccacaaucagcaccgaccucaccuucucagucaaauccucccgcggcucaucugacccccaaggcgucacaugcggcgccgccacccucuccgccgaacgcguccgcggcgacaacaaagaauacgaauacuccgucgaaugucaagaagacuccgccugccccgccgccgaagaaucacuccccaucgaagucauggucgacgcaguccacaaacucaaauacgaaaacuacaccuccuccuucuucauccgcgacauaauaaaacccgacccacccaaaaaccuccaacucaagccacucaaaaacucccgacaagucgaagucuccugggaguaccccgacaccugguccacaccacacuccuacuucucccucaccuucugcguccaaguccaaggcaaauccaaacgcgaaaaaaaagaccgcguuuucacagacaaaaccuccgccacaguaauaugccgcaaaaacgccuccaucuccguccgggcccaagaccgcuacuacuccuccuccugguccgagugggccucaguccccugcagcgggaguacgagugggagugggaagccggggaguggggaggggaguacgaaggggcgcaaccucccagucgccacccccgaccccggcauguuccccugccuccaccacucccaaaaccuccuccgcgccgucuccaacaugcuccaaaaagcccgccaaacccucgaauuuuaccccugcaccuccgaagagaucgaccacgaagacaucaccaaagacaaaaccuccacagucgaagccugccucccccucgaacucaccaaaaacgaauccugccuuaacucccgcgaaaccuccuucaucaccaacggcuccugccucgccucccgcaaaaccuccuucaugauggcccucugccucuccuccaucuacgaagaccucaaaauguaccaagucgaauuuaaaaccaugaacgccaaacuccucauggaccccaaacgccaaaucuuccucgaccaaaacaugcucgccgucaucgacgaacucaugcaagcccucaacuucaacuccgaaaccgucccccaaaaauccucccucgaagaacccgacuucuacaaaaccaaaaucaaacuuugcauccuccuccacgcauuccgcauccgcgccgucaccaucgaccgugucaugagcuaccuaaacgccuccugaggacuaguuauaagacugacuagcccgaugggccucccaacgggcccuccuccccuccuugcaccgagauuaauaaaaaaaaaaaaaaaaaaaaaaaaaaaaaaaaaaaaaaaaaaaaaaaaaaaaaaaaaaaaaaaaugcaucccccccccccccccccccccccccccccccaaaggcucuuuucagagccaccagaauu

SEQ ID NO: 275 - RNA, 1003 nt, Artificial Sequence
  CD40LG mRNA product opt10
gggagaaagcuuaccaugaucgaaaccuacaaucaaaccuccccccgcagcgccgcaacaggccuccccaucuccaugaaaaucuucauguaccuccucaccgucuuccuaaucacccaaaugaucggcuccgcccuauucgccgucuaccuccaccgccgccucgacaaaaucgaagacgaacgcaaccuccacgaagacuuugucuucaugaaaacuauccaacgaugcaacaccggcgaacgaucccuaucccuccucaacugcgaagaaauaaaaucccaauucgaaggauucgucaaagacaucaugcuaaacaaagaagaaaccaaaaaagaaaacuccuucgaaaugcaaaaaggcgaccaaaacccccaaaucgcagcccacgucaucucagaagcaucuuccaaaaccaccuccguccuccaaugggccgaaaaaggcuacuacaccaugucaaacaaccucgucacccucgaaaacggcaaacaacucaccgucaaacgccaaggccucuacuacaucuacgcacaagucaccuucugcuccaaccgcgaagcauccucccaagcccccuucaucgccucccucugccucaaaucccccggccgcuucgaacgcauccuccuccgcgccgcaaauacccacuccuccgccaaaccaugcggccaacaauccauccaccucggcggcgucuucgaacuccaacccggcgccuccgucuucgucaacgucaccgaccccucccaaguaucccauggaaccggcuucaccuccuucggccuccucaaacucuagggacuaguuauaagacugacuagcccgaugggccucccaacgggcccuccuccccuccuugcaccgagauuaauaaaaaaaaaaaaaaaaaaaaaaaaaaaaaaaaaaaaaaaaaaaaaaaaaaaaaaaaaaaaaaaaugcaucccccccccccccccccccccccccccccccaaaggcucuuuucagagccaccagaauu

SEQ ID NO: 276 - RNA, 1249 nt, Artificial Sequence
  PDCD1 mRNA product TOP UTR wild type
ggggcgcugccuacggagguggcagccaucuccuucucggcaucaagcuuaccaugcagaucccacaggcgcccuggccagucgucugggcggugcuacaacugggcuggcggccaggaugguucuuagacuccccagacaggcccuggaacccccccaccuucuccccagcccugcucguggugaccgaaggggacaacgccaccuucaccugcagcuucuccaacacaucggagagcuucgugcuaaacugguaccgcaugagccccagcaaccagacggacaagcuggccgcuuuccccgaggaccgcagccagcccggccaggacugccgcuuccgugucacacaacugcccaacgggcgugacuuccacaugagcguggucagggcccggcgcaaugacagcggcaccuaccucuguggggccaucucccuggcccccaaggcgcagaucaaagagagccugcgggcagagcucagggugacagagagaagggcagaagugcccacagcccaccccagccccucacccaggccagccggccaguuccaaacccuggugguuggugucgugggcggccugcugggcagccuggugcugcuagucuggguccuggccgucaucugcucccgggccgcacgagggacaauaggagccaggcgcaccggccagccccugaaggaggaccccucagccgugccuguguucucuguggacuauggggagcuggauuuccaguggcgagagaagaccccggagccccccgugcccugugucccugagcagacggaguaugccaccauugucuuuccuagcggaaugggcaccucaucccccgcccgcaggggcucagccgacggcccucggagugcccagccacugaggccugaggauggacacugcucuuggccccucugaggacuagugcaucacauuuaaaagcaucucagccuaccaugagaauaagagaaagaaaaugaagaucaauagcuuauucaucucuuuuucuuuuucguugguguaaagccaacacccugucuaaaaaacauaaauuucuuuaaucauuuugccucuuuucucugugcuucaauuaauaaaaaauggaaagaaccuagaucuaaaaaaaaaaaaaaaaaaaaaaaaaaaaaaaaaaaaaaaaaaaaaaaaaaaaaaaaaaaaaaaaugcaucccccccccccccccccccccccccccccccaaaggcucuuuucagagccaccagaauu

SEQ ID NO: 277 - RNA, 832 nt, Artificial Sequence
  PDCD1(1-149) mRNA product TOP UTR wild type
ggggcgcugccuacggagguggcagccaucuccuucucggcaucaagcuuaccaugcagaucccacaggcgcccuggccagucgucugggcggugcuacaacugggcuggcggccaggaugguucuuagacuccccagacaggcccuggaacccccccaccuucuccccagcccugcucguggugaccgaaggggacaacgccaccuucaccugcagcuucuccaacacaucggagagcuucgugcuaaacugguaccgcaugagccccagcaaccagacggacaagcuggccgcuuuccccgaggaccgcagccagcccggccaggacugccgcuuccgugucacacaacugcccaacgggcgugacuuccacaugagcguggucagggcccggcgcaaugacagcggcaccuaccucuguggggccaucucccuggcccccaaggcgcagaucaaagagagccugcgggcagagcucagggugacagagagaagggcaugaggacuagugcaucacauuuaaaagcaucucagccuaccaugagaauaagagaaagaaaaugaagaucaauagcuuauucaucucuuuuucuuuuucguugguguaaagccaacacccugucuaaaaaacauaaauuucuuuaaucauuuugccucuuuucucugugcuucaauuaauaaaaaauggaaagaaccuagaucuaaaaaaaaaaaaaaaaaaaaaaaaaaaaaaaaaaaaaaaaaaaaaaaaaaaaaaaaaaaaaaaaugcaucccccccccccccccccccccccccccccccaaaggcucuuuucagagccaccagaauu

SEQ ID NO: 278 - RNA, 1042 nt, Artificial Sequence
  IL12A mRNA product TOP UTR wild type
ggggcgcugccuacggagguggcagccaucuccuucucggcaucaagcuuaccauguguccagcgcgcagccuccuccuuguggcuacccugguccuccuggaccaccucaguuuggccagaaaccuccccguggccacuccagacccaggaauguucccaugccuucaccacucccaaaaccugcugagggccgucagcaacaugcuccagaaggccagacaaacucuagaauuuuacccuugcacuucugaagagauugaucaugaagauaucacaaaagauaaaaccagcacaguggaggccuguuuaccauuggaauuaaccaagaaugagaguugccuaaauuccagagagaccucuuucauaacuaaugggaguugccuggccuccagaaagaccucuuuuaugauggcccugugccuuaguaguauuuaugaagacuugaagauguaccagguggaguucaagaccaugaaugcaaagcuucugauggauccuaagaggcagaucuuucuagaucaaaacaugcuggcaguuauugaugagcugaugcaggcccugaauuucaacagugagacugugccacaaaaauccucccuugaagaaccggauuuuuauaaaacuaaaaucaagcucugcauacuucuucaugcuuucagaauucgggcagugacuauugauagagugaugagcuaucugaaugcuuccuaaggacuagugcaucacauuuaaaagcaucucagccuaccaugagaauaagagaaagaaaaugaagaucaauagcuuauucaucucuuuuucuuuuucguugguguaaagccaacacccugucuaaaaaacauaaauuucuuuaaucauuuugccucuuuucucugugcuucaauuaauaaaaaauggaaagaaccuagaucuaaaaaaaaaaaaaaaaaaaaaaaaaaaaaaaaaaaaaaaaaaaaaaaaaaaaaaaaaaaaaaaaugcaucccccccccccccccccccccccccccccccaaaggcucuuuucagagccaccagaauu

SEQ ID NO: 279 - RNA, 1039 nt, Artificial Sequence
  IL12A(1-219) mRNA product TOP UTR wild type
ggggcgcugccuacggagguggcagccaucuccuucucggcaucaagcuuaccauguguccagcgcgcagccuccuccuuguggcuacccugguccuccuggaccaccucaguuuggccagaaaccuccccguggccacuccagacccaggaauguucccaugccuucaccacucccaaaaccugcugagggccgucagcaacaugcuccagaaggccagacaaacucuagaauuuuacccuugcacuucugaagagauugaucaugaagauaucacaaaagauaaaaccagcacaguggaggccuguuuaccauuggaauuaaccaagaaugagaguugccuaaauuccagagagaccucuuucauaacuaaugggaguugccuggccuccagaaagaccucuuuuaugauggcccugugccuuaguaguauuuaugaagacuugaagauguaccagguggaguucaagaccaugaaugcaaagcuucugauggauccuaagaggcagaucuuucuagaucaaaacaugcuggcaguuauugaugagcugaugcaggcccugaauuucaacagugagacugugccacaaaaauccucccuugaagaaccggauuuuuauaaaacuaaaaucaagcucugcauacuucuucaugcuuucagaauucgggcagugacuauugauagagugaugagcuaucugaaugcuuccggacuagugcaucacauuuaaaagcaucucagccuaccaugagaauaagagaaagaaaaugaagaucaauagcuuauucaucucuuuuucuuuuucguugguguaaagccaacacccugucuaaaaaacauaaauuucuuuaaucauuuugccucuuuucucugugcuucaauuaauaaaaaauggaaagaaccuagaucuaaaaaaaaaaaaaaaaaaaaaaaaaaaaaaaaaaaaaaaaaaaaaaaaaaaaaaaaaaaaaaaaugcaucccccccccccccccccccccccccccccccaaaggcucuuuucagagccaccagaauu

SEQ ID NO: 280 - RNA, 976 nt, Artificial Sequence
  IL12A(23-219) mRNA product TOP UTR wild type
ggggcgcugccuacggagguggcagccaucuccuucucggcaucaagcuuaccagaaaccuccccguggccacuccagacccaggaauguucccaugccuucaccacucccaaaaccugcugagggccgucagcaacaugcuccagaaggccagacaaacucuagaauuuuacccuugcacuucugaagagauugaucaugaagauaucacaaaagauaaaaccagcacaguggaggccuguuuaccauuggaauuaaccaagaaugagaguugccuaaauuccagagagaccucuuucauaacuaaugggaguugccuggccuccagaaagaccucuuuuaugauggcccugugccuuaguaguauuuaugaagacuugaagauguaccagguggaguucaagaccaugaaugcaaagcuucugauggauccuaagaggcagaucuuucuagaucaaaacaugcuggcaguuauugaugagcugaugcaggcccugaauuucaacagugagacugugccacaaaaauccucccuugaagaaccggauuuuuauaaaacuaaaaucaagcucugcauacuucuucaugcuuucagaauucgggcagugacuauugauagagugaugagcuaucugaaugcuuccuaaggacuagugcaucacauuuaaaagcaucucagccuaccaugagaauaagagaaagaaaaugaagaucaauagcuuauucaucucuuuuucuuuuucguugguguaaagccaacacccugucuaaaaaacauaaauuucuuuaaucauuuugccucuuuucucugugcuucaauuaauaaaaaauggaaagaaccuagaucuaaaaaaaaaaaaaaaaaaaaaaaaaaaaaaaaaaaaaaaaaaaaaaaaaaaaaaaaaaaaaaaaugcaucccccccccccccccccccccccccccccccaaaggcucuuuucagagccaccagaauu

SEQ ID NO: 281 - RNA, 1369 nt, Artificial Sequence
  IL12B mRNA product TOP UTR wild type
ggggcgcugccuacggagguggcagccaucuccuucucggcaucaagcuuaccaugugucaccagcaguuggucaucucuugguuuucccugguuuuucuggcaucuccccucguggccauaugggaacugaagaaagauguuuaugucguagaauuggauugguauccggaugccccuggagaaauggugguccucaccugugacaccccugaagaagaugguaucaccuggaccuuggaccagagcagugaggucuuaggcucuggcaaaacccugaccauccaagucaaagaguuuggagaugcuggccaguacaccugucacaaaggaggcgagguucuaagccauucgcuccugcugcuucacaaaaaggaagauggaauuugguccacugauauuuuaaaggaccagaaagaacccaaaaauaagaccuuucuaagaugcgaggccaagaauuauucuggacguuucaccugcugguggcugacgacaaucaguacugauuugacauucagugucaaaagcagcagaggcucuucugacccccaaggggugacgugcggagcugcuacacucucugcagagagagucagaggggacaacaaggaguaugaguacucaguggagugccaggaggacagugccugcccagcugcugaggagagucugcccauugaggucaugguggaugccguucacaagcucaaguaugaaaacuacaccagcagcuucuucaucagggacaucaucaaaccugacccacccaagaacuugcagcugaagccauuaaagaauucucggcagguggaggucagcugggaguacccugacaccuggaguacuccacauuccuacuucucccugacauucugcguucagguccagggcaagagcaagagagaaaagaaagauagagucuucacggacaagaccucagccacggucaucugccgcaaaaaugccagcauuagcgugcgggcccaggaccgcuacuauagcucaucuuggagcgaaugggcaucugugcccugcaguuagggacuagugcaucacauuuaaaagcaucucagccuaccaugagaauaagagaaagaaaaugaagaucaauagcuuauucaucucuuuuucuuuuucguugguguaaagccaacacccugucuaaaaaacauaaauuucuuuaaucauuuugccucuuuucucugugcuucaauuaauaaaaaauggaaagaaccuagaucuaaaaaaaaaaaaaaaaaaaaaaaaaaaaaaaaaaaaaaaaaaaaaaaaaaaaaaaaaaaaaaaaugcaucccccccccccccccccccccccccccccccaaaggcucuuuucagagccaccagaauu

SEQ ID NO: 282 - RNA, 1366 nt, Artificial Sequence
  IL12B(1-328) mRNA product TOP UTR wild type
ggggcgcugccuacggagguggcagccaucuccuucucggcaucaagcuuaccaugugucaccagcaguuggucaucucuugguuuucccugguuuuucuggcaucuccccucguggccauaugggaacugaagaaagauguuuaugucguagaauuggauugguauccggaugccccuggagaaauggugguccucaccugugacaccccugaagaagaugguaucaccuggaccuuggaccagagcagugaggucuuaggcucuggcaaaacccugaccauccaagucaaagaguuuggagaugcuggccaguacaccugucacaaaggaggcgagguucuaagccauucgcuccugcugcuucacaaaaaggaagauggaauuugguccacugauauuuuaaaggaccagaaagaacccaaaaauaagaccuuucuaagaugcgaggccaagaauuauucuggacguuucaccugcugguggcugacgacaaucaguacugauuugacauucagugucaaaagcagcagaggcucuucugacccccaaggggugacgugcggagcugcuacacucucugcagagagagucagaggggacaacaaggaguaugaguacucaguggagugccaggaggacagugccugcccagcugcugaggagagucugcccauugaggucaugguggaugccguucacaagcucaaguaugaaaacuacaccagcagcuucuucaucagggacaucaucaaaccugacccacccaagaacuugcagcugaagccauuaaagaauucucggcagguggaggucagcugggaguacccugacaccuggaguacuccacauuccuacuucucccugacauucugcguucagguccagggcaagagcaagagagaaaagaaagauagagucuucacggacaagaccucagccacggucaucugccgcaaaaaugccagcauuagcgugcgggcccaggaccgcuacuauagcucaucuuggagcgaaugggcaucugugcccugcaguggacuagugcaucacauuuaaaagcaucucagccuaccaugagaauaagagaaagaaaaugaagaucaauagcuuauucaucucuuuuucuuuuucguugguguaaagccaacacccugucuaaaaaacauaaauuucuuuaaucauuuugccucuuuucucugugcuucaauuaauaaaaaauggaaagaaccuagaucuaaaaaaaaaaaaaaaaaaaaaaaaaaaaaaaaaaaaaaaaaaaaaaaaaaaaaaaaaaaaaaaaugcaucccccccccccccccccccccccccccccccaaaggcucuuuucagagccaccagaauu

SEQ ID NO: 283 - RNA, 1303 nt, Artificial Sequence
  IL12B(23-328) mRNA product TOP UTR wild type
ggggcgcugccuacggagguggcagccaucuccuucucggcaucaagcuuaccauaugggaacugaagaaagauguuuaugucguagaauuggauugguauccggaugccccuggagaaauggugguccucaccugugacaccccugaagaagaugguaucaccuggaccuuggaccagagcagugaggucuuaggcucuggcaaaacccugaccauccaagucaaagaguuuggagaugcuggccaguacaccugucacaaaggaggcgagguucuaagccauucgcuccugcugcuucacaaaaaggaagauggaauuugguccacugauauuuuaaaggaccagaaagaacccaaaaauaagaccuuucuaagaugcgaggccaagaauuauucuggacguuucaccugcugguggcugacgacaaucaguacugauuugacauucagugucaaaagcagcagaggcucuucugacccccaaggggugacgugcggagcugcuacacucucugcagagagagucagaggggacaacaaggaguaugaguacucaguggagugccaggaggacagugccugcccagcugcugaggagagucugcccauugaggucaugguggaugccguucacaagcucaaguaugaaaacuacaccagcagcuucuucaucagggacaucaucaaaccugacccacccaagaacuugcagcugaagccauuaaagaauucucggcagguggaggucagcugggaguacccugacaccuggaguacuccacauuccuacuucucccugacauucugcguucagguccagggcaagagcaagagagaaaagaaagauagagucuucacggacaagaccucagccacggucaucugccgcaaaaaugccagcauuagcgugcgggcccaggaccgcuacuauagcucaucuuggagcgaaugggcaucugugcccugcaguuagggacuagugcaucacauuuaaaagcaucucagccuaccaugagaauaagagaaagaaaaugaagaucaauagcuuauucaucucuuuuucuuuuucguugguguaaagccaacacccugucuaaaaaacauaaauuucuuuaaucauuuugccucuuuucucugugcuucaauuaauaaaaaauggaaagaaccuagaucuaaaaaaaaaaaaaaaaaaaaaaaaaaaaaaaaaaaaaaaaaaaaaaaaaaaaaaaaaaaaaaaaugcaucccccccccccccccccccccccccccccccaaaggcucuuuucagagccaccagaauu

SEQ ID NO: 284 - RNA, 436 nt, Artificial Sequence
  Linker-sFvCC49-218 mRNA product TOP UTR wild type
ggggcgcugccuacggagguggcagccaucuccuucucggcaucaagcuuaccggcaguacuucgggcagugguaagccugguaguggugaggguaguacuaaggguggacuagugcaucacauuuaaaagcaucucagccuaccaugagaauaagagaaagaaaaugaagaucaauagcuuauucaucucuuuuucuuuuucguugguguaaagccaacacccugucuaaaaaacauaaauuucuuuaaucauuuugccucuuuucucugugcuucaauuaauaaaaaauggaaagaaccuagaucuaaaaaaaaaaaaaaaaaaaaaaaaaaaaaaaaaaaaaaaaaaaaaaaaaaaaaaaaaaaaaaaaugcaucccccccccccccccccccccccccccccccaaaggcucuuuucagagccaccagaauu

SEQ ID NO: 285 - RNA, 2014 nt, Artificial Sequence
  IL12 mRNA product TOP UTR wild type
ggggcgcugccuacggagguggcagccaucuccuucucggcaucaagcuuaccaugugucaccagcaguuggucaucucuugguuuucccugguuuuucuggcaucuccccucguggccauaugggaacugaagaaagauguuuaugucguagaauuggauugguauccggaugccccuggagaaauggugguccucaccugugacaccccugaagaagaugguaucaccuggaccuuggaccagagcagugaggucuuaggcucuggcaaaacccugaccauccaagucaaagaguuuggagaugcuggccaguacaccugucacaaaggaggcgagguucuaagccauucgcuccugcugcuucacaaaaaggaagauggaauuugguccacugauauuuuaaaggaccagaaagaacccaaaaauaagaccuuucuaagaugcgaggccaagaauuauucuggacguuucaccugcugguggcugacgacaaucaguacugauuugacauucagugucaaaagcagcagaggcucuucugacccccaaggggugacgugcggagcugcuacacucucugcagagagagucagaggggacaacaaggaguaugaguacucaguggagugccaggaggacagugccugcccagcugcugaggagagucugcccauugaggucaugguggaugccguucacaagcucaaguaugaaaacuacaccagcagcuucuucaucagggacaucaucaaaccugacccacccaagaacuugcagcugaagccauuaaagaauucucggcagguggaggucagcugggaguacccugacaccuggaguacuccacauuccuacuucucccugacauucugcguucagguccagggcaagagcaagagagaaaagaaagauagagucuucacggacaagaccucagccacggucaucugccgcaaaaaugccagcauuagcgugcgggcccaggaccgcuacuauagcucaucuuggagcgaaugggcaucugugcccugcaguggcaguacuucgggcagugguaagccugguaguggugaggguaguacuaaggguagaaaccuccccguggccacuccagacccaggaauguucccaugccuucaccacucccaaaaccugcugagggccgucagcaacaugcuccagaaggccagacaaacucuagaauuuuacccuugcacuucugaagagauugaucaugaagauaucacaaaagauaaaaccagcacaguggaggccuguuuaccauuggaauuaaccaagaaugagaguugccuaaauuccagagagaccucuuucauaacuaaugggaguugccuggccuccagaaagaccucuuuuaugauggcccugugccuuaguaguauuuaugaagacuugaagauguaccagguggaguucaagaccaugaaugcaaagcuucugauggauccuaagaggcagaucuuucuagaucaaaacaugcuggcaguuauugaugagcugaugcaggcccugaauuucaacagugagacugugccacaaaaauccucccuugaagaaccggauuuuuauaaaacuaaaaucaagcucugcauacuucuucaugcuuucagaauucgggcagugacuauugauagagugaugagcuaucugaaugcuuccuaaggacuagugcaucacauuuaaaagcaucucagccuaccaugagaauaagagaaagaaaaugaagaucaauagcuuauucaucucuuuuucuuuuucguugguguaaagccaacacccugucuaaaaaacauaaauuucuuuaaucauuuugccucuuuucucugugcuucaauuaauaaaaaauggaaagaaccuagaucuaaaaaaaaaaaaaaaaaaaaaaaaaaaaaaaaaaaaaaaaaaaaaaaaaaaaaaaaaaaaaaaaugcaucccccccccccccccccccccccccccccccaaaggcucuuuucagagccaccagaauu

SEQ ID NO: 286 - RNA, 1168 nt, Artificial Sequence
  CD40LG mRNA product TOP UTR wild type
ggggcgcugccuacggagguggcagccaucuccuucucggcaucaagcuuaccaugaucgaaacauacaaccaaacuucuccccgaucugcggccacuggacugcccaucagcaugaaaauuuuuauguauuuacuuacuguuuuucuuaucacccagaugauugggucagcacuuuuugcuguguaucuucauagaagguuggacaagauagaagaugaaaggaaucuucaugaagauuuuguauucaugaaaacgauacagagaugcaacacaggagaaagauccuuauccuuacugaacugugaggagauuaaaagccaguuugaaggcuuugugaaggauauaauguuaaacaaagaggagacgaagaaagaaaacagcuuugaaaugcaaaaaggugaucagaauccucaaauugcggcacaugucauaagugaggccagcaguaaaacaacaucuguguuacagugggcugaaaaaggauacuacaccaugagcaacaacuugguaacccuggaaaaugggaaacagcugaccguuaaaagacaaggacucuauuauaucuaugcccaagucaccuucuguuccaaucgggaagcuucgagucaagcuccauuuauagccagccucugccuaaagucccccgguagauucgagagaaucuuacucagagcugcaaauacccacaguuccgccaaaccuugcgggcaacaauccauucacuugggaggaguauuugaauugcaaccaggugcuucgguguuugucaaugugacugauccaagccaagugagccauggcacuggcuucacguccuuuggcuuacucaaacucugaggacuagugcaucacauuuaaaagcaucucagccuaccaugagaauaagagaaagaaaaugaagaucaauagcuuauucaucucuuuuucuuuuucguugguguaaagccaacacccugucuaaaaaacauaaauuucuuuaaucauuuugccucuuuucucugugcuucaauuaauaaaaaauggaaagaaccuagaucuaaaaaaaaaaaaaaaaaaaaaaaaaaaaaaaaaaaaaaaaaaaaaaaaaaaaaaaaaaaaaaaaugcaucccccccccccccccccccccccccccccccaaaggcucuuuucagagccaccagaauu

SEQ ID NO: 287 - RNA, 1249 nt, Artificial Sequence
  PDCD1 mRNA product TOP UTR opt1
ggggcgcugccuacggagguggcagccaucuccuucucggcaucaagcuuaccaugcagaucccccaggccccguggcccguggucugggccgugcugcagcucggcuggcgccccgggugguuccuggacagccccgaccggccguggaacccgcccaccuucucccccgcgcugcucguggucaccgagggcgacaacgccacguucacgugcagcuucuccaacaccagcgaguccuucgugcugaacugguaccgcaugagccccuccaaccagaccgacaagcuggccgccuuccccgaggaccggagccagcccgggcaggacugccgcuuccgggugacccagcuccccaacggccgcgacuuccacauguccgucgugcgggcccgccggaacgacagcgggaccuaccugugcggcgcgaucucccuggccccgaaggcccagaucaaggagagccuccgcgccgagcugcgggugaccgagcgccgggcggagguccccaccgcccaccccucccccagcccgcgccccgccggccaguuccagacgcugguggugggggucgugggcgggcuccugggcucccuggugcuccuggucugggugcuggccgugaucugcagccgggccgcgcgcgggaccaucggcgcccggcgcaccggccagccccucaaggaggaccccuccgccgucccgguguucagcguggacuacggggagcuggacuuccaguggcgggagaagacccccgagccgcccguccccugcgugcccgagcagacggaguacgccaccaucguguuccccuccggcauggggaccagcagccccgcccgccggggcuccgcggacggcccgcgcagcgcccagccccugcgccccgaggacgggcacugcuccuggccgcucugaggacuagugcaucacauuuaaaagcaucucagccuaccaugagaauaagagaaagaaaaugaagaucaauagcuuauucaucucuuuuucuuuuucguugguguaaagccaacacccugucuaaaaaacauaaauuucuuuaaucauuuugccucuuuucucugugcuucaauuaauaaaaaauggaaagaaccuagaucuaaaaaaaaaaaaaaaaaaaaaaaaaaaaaaaaaaaaaaaaaaaaaaaaaaaaaaaaaaaaaaaaugcaucccccccccccccccccccccccccccccccaaaggcucuuuucagagccaccagaauu

SEQ ID NO: 288 - RNA, 832 nt, Artificial Sequence
  PDCD1(1-149) mRNA product TOP UTR opt1
ggggcgcugccuacggagguggcagccaucuccuucucggcaucaagcuuaccaugcagaucccccaggccccguggcccguggucugggccgugcugcagcucggcuggcgccccgggugguuccuggacagccccgaccggccguggaacccgcccaccuucucccccgcgcugcucguggucaccgagggcgacaacgccacguucacgugcagcuucuccaacaccagcgaguccuucgugcugaacugguaccgcaugagccccuccaaccagaccgacaagcuggccgccuuccccgaggaccggagccagcccgggcaggacugccgcuuccgggugacccagcuccccaacggccgcgacuuccacauguccgucgugcgggcccgccggaacgacagcgggaccuaccugugcggcgcgaucucccuggccccgaaggcccagaucaaggagagccuccgcgccgagcugcgggugaccgagcgccgggcgugaggacuagugcaucacauuuaaaagcaucucagccuaccaugagaauaagagaaagaaaaugaagaucaauagcuuauucaucucuuuuucuuuuucguugguguaaagccaacacccugucuaaaaaacauaaauuucuuuaaucauuuugccucuuuucucugugcuucaauuaauaaaaaauggaaagaaccuagaucuaaaaaaaaaaaaaaaaaaaaaaaaaaaaaaaaaaaaaaaaaaaaaaaaaaaaaaaaaaaaaaaaugcaucccccccccccccccccccccccccccccccaaaggcucuuuucagagccaccagaauu

SEQ ID NO: 289 - RNA, 1042 nt, Artificial Sequence
  IL12A mRNA product TOP UTR opt1
ggggcgcugccuacggagguggcagccaucuccuucucggcaucaagcuuaccaugugccccgcccgcagccugcuccugguggccacccugguccuccuggaccaccugucccucgcgcggaaccugccgguggccacccccgaccccggcauguuccccugccugcaccacagccagaaccuccugcgcgccguguccaacaugcugcagaaggcccggcagacgcucgaguucuacccgugcaccagcgaggagaucgaccacgaggacaucaccaaggacaagaccuccacggucgaggccugccugccccuggagcucaccaagaacgagagcugccugaacucccgcgagaccagcuucaucaccaacggguccugccuggcgagccggaagacguccuucaugauggcccucugccugagcuccaucuacgaggaccugaagauguaccagguggaguucaagaccaugaacgccaagcuccugauggaccccaagcgccagaucuuccuggaccagaacaugcucgccgugaucgacgagcugaugcaggcgcugaacuucaacagcgagaccgucccccagaaguccagccucgaggagccggacuucuacaagaccaagaucaagcugugcauccugcuccacgccuuccggauccgcgccgugacgaucgaccgggugauguccuaccugaacgccagcugaggacuagugcaucacauuuaaaagcaucucagccuaccaugagaauaagagaaagaaaaugaagaucaauagcuuauucaucucuuuuucuuuuucguugguguaaagccaacacccugucuaaaaaacauaaauuucuuuaaucauuuugccucuuuucucugugcuucaauuaauaaaaaauggaaagaaccuagaucuaaaaaaaaaaaaaaaaaaaaaaaaaaaaaaaaaaaaaaaaaaaaaaaaaaaaaaaaaaaaaaaaugcaucccccccccccccccccccccccccccccccaaaggcucuuuucagagccaccagaauu

SEQ ID NO: 290 - RNA, 1039 nt, Artificial Sequence
  IL12A(1-219) mRNA product TOP UTR opt1
ggggcgcugccuacggagguggcagccaucuccuucucggcaucaagcuuaccaugugccccgcccgcagccugcuccugguggccacccugguccuccuggaccaccugucccucgcgcggaaccugccgguggccacccccgaccccggcauguuccccugccugcaccacagccagaaccuccugcgcgccguguccaacaugcugcagaaggcccggcagacgcucgaguucuacccgugcaccagcgaggagaucgaccacgaggacaucaccaaggacaagaccuccacggucgaggccugccugccccuggagcucaccaagaacgagagcugccugaacucccgcgagaccagcuucaucaccaacggguccugccuggcgagccggaagacguccuucaugauggcccucugccugagcuccaucuacgaggaccugaagauguaccagguggaguucaagaccaugaacgccaagcuccugauggaccccaagcgccagaucuuccuggaccagaacaugcucgccgugaucgacgagcugaugcaggcgcugaacuucaacagcgagaccgucccccagaaguccagccucgaggagccggacuucuacaagaccaagaucaagcugugcauccugcuccacgccuuccggauccgcgccgugacgaucgaccgggugauguccuaccugaacgccagcggacuagugcaucacauuuaaaagcaucucagccuaccaugagaauaagagaaagaaaaugaagaucaauagcuuauucaucucuuuuucuuuuucguugguguaaagccaacacccugucuaaaaaacauaaauuucuuuaaucauuuugccucuuuucucugugcuucaauuaauaaaaaauggaaagaaccuagaucuaaaaaaaaaaaaaaaaaaaaaaaaaaaaaaaaaaaaaaaaaaaaaaaaaaaaaaaaaaaaaaaaugcaucccccccccccccccccccccccccccccccaaaggcucuuuucagagccaccagaauu

SEQ ID NO: 291 - RNA, 976 nt, Artificial Sequence
  IL12A(23-219) mRNA product TOP UTR opt1
ggggcgcugccuacggagguggcagccaucuccuucucggcaucaagcuuacccggaaccugccgguggccacccccgaccccggcauguuccccugccugcaccacagccagaaccuccugcgcgccguguccaacaugcugcagaaggcccggcagacgcucgaguucuacccgugcaccagcgaggagaucgaccacgaggacaucaccaaggacaagaccuccacggucgaggccugccugccccuggagcucaccaagaacgagagcugccugaacucccgcgagaccagcuucaucaccaacggguccugccuggcgagccggaagacguccuucaugauggcccucugccugagcuccaucuacgaggaccugaagauguaccagguggaguucaagaccaugaacgccaagcuccugauggaccccaagcgccagaucuuccuggaccagaacaugcucgccgugaucgacgagcugaugcaggcgcugaacuucaacagcgagaccgucccccagaaguccagccucgaggagccggacuucuacaagaccaagaucaagcugugcauccugcuccacgccuuccggauccgcgccgugacgaucgaccgggugauguccuaccugaacgccagcugaggacuagugcaucacauuuaaaagcaucucagccuaccaugagaauaagagaaagaaaaugaagaucaauagcuuauucaucucuuuuucuuuuucguugguguaaagccaacacccugucuaaaaaacauaaauuucuuuaaucauuuugccucuuuucucugugcuucaauuaauaaaaaauggaaagaaccuagaucuaaaaaaaaaaaaaaaaaaaaaaaaaaaaaaaaaaaaaaaaaaaaaaaaaaaaaaaaaaaaaaaaugcaucccccccccccccccccccccccccccccccaaaggcucuuuucagagccaccagaauu

SEQ ID NO: 292 - RNA, 1369 nt, Artificial Sequence
  IL12B mRNA product TOP UTR opt1
ggggcgcugccuacggagguggcagccaucuccuucucggcaucaagcuuaccaugugccaccagcagcuggugaucagcugguucucccucgucuuccuggccagcccccugguggccaucugggagcucaagaaggacguguacgucguggagcuggacugguacccggacgcgcccggcgagauggugguccugaccugcgacacccccgaggaggacgggaucacguggacccucgaccaguccagcgaggugcugggcuccgggaagacccugaccauccaggugaaggaguucggcgacgccgggcaguacacgugccacaagggcggcgagguccucagccacucccugcugcuccugcacaagaaggaggacgggaucuggagcaccgacauccugaaggaccagaaggagcccaagaacaagaccuuccuccgcugcgaggccaagaacuacuccggccgguucacgugcugguggcugaccaccaucagcaccgaccugaccuucuccgucaagagcucccgcgggagcuccgacccgcagggcgugacgugcggggccgccacccucagcgcggagcgggugcgcggcgacaacaaggaguacgaguacuccguggagugccaggaggacagcgccugccccgccgccgaggagucccugcccaucgaggugauggucgacgcggugcacaagcugaaguacgagaacuacaccagcagcuucuucauccgggacaucaucaagcccgacccgcccaagaaccuccagcugaagccccugaagaacucccgccagguggaggucagcugggaguaccccgacaccugguccacgccgcacagcuacuucucccucaccuucugcguccaggugcagggcaagagcaagcgggagaagaaggaccgcguguucaccgacaagaccuccgccacggugaucugccggaagaacgccagcaucuccgugcgcgcccaggaccgguacuacagcuccagcugguccgagugggccagcguccccugcuccugaggacuagugcaucacauuuaaaagcaucucagccuaccaugagaauaagagaaagaaaaugaagaucaauagcuuauucaucucuuuuucuuuuucguugguguaaagccaacacccugucuaaaaaacauaaauuucuuuaaucauuuugccucuuuucucugugcuucaauuaauaaaaaauggaaagaaccuagaucuaaaaaaaaaaaaaaaaaaaaaaaaaaaaaaaaaaaaaaaaaaaaaaaaaaaaaaaaaaaaaaaaugcaucccccccccccccccccccccccccccccccaaaggcucuuuucagagccaccagaauu

SEQ ID NO: 293 - RNA, 1366 nt, Artificial Sequence
  IL12B(1-328) mRNA product TOP UTR opt1
ggggcgcugccuacggagguggcagccaucuccuucucggcaucaagcuuaccaugugccaccagcagcuggugaucagcugguucucccucgucuuccuggccagcccccugguggccaucugggagcucaagaaggacguguacgucguggagcuggacugguacccggacgcgcccggcgagauggugguccugaccugcgacacccccgaggaggacgggaucacguggacccucgaccaguccagcgaggugcugggcuccgggaagacccugaccauccaggugaaggaguucggcgacgccgggcaguacacgugccacaagggcggcgagguccucagccacucccugcugcuccugcacaagaaggaggacgggaucuggagcaccgacauccugaaggaccagaaggagcccaagaacaagaccuuccuccgcugcgaggccaagaacuacuccggccgguucacgugcugguggcugaccaccaucagcaccgaccugaccuucuccgucaagagcucccgcgggagcuccgacccgcagggcgugacgugcggggccgccacccucagcgcggagcgggugcgcggcgacaacaaggaguacgaguacuccguggagugccaggaggacagcgccugccccgccgccgaggagucccugcccaucgaggugauggucgacgcggugcacaagcugaaguacgagaacuacaccagcagcuucuucauccgggacaucaucaagcccgacccgcccaagaaccuccagcugaagccccugaagaacucccgccagguggaggucagcugggaguaccccgacaccugguccacgccgcacagcuacuucucccucaccuucugcguccaggugcagggcaagagcaagcgggagaagaaggaccgcguguucaccgacaagaccuccgccacggugaucugccggaagaacgccagcaucuccgugcgcgcccaggaccgguacuacagcuccagcugguccgagugggccagcguccccugcuccggacuagugcaucacauuuaaaagcaucucagccuaccaugagaauaagagaaagaaaaugaagaucaauagcuuauucaucucuuuuucuuuuucguugguguaaagccaacacccugucuaaaaaacauaaauuucuuuaaucauuuugccucuuuucucugugcuucaauuaauaaaaaauggaaagaaccuagaucuaaaaaaaaaaaaaaaaaaaaaaaaaaaaaaaaaaaaaaaaaaaaaaaaaaaaaaaaaaaaaaaaugcaucccccccccccccccccccccccccccccccaaaggcucuuuucagagccaccagaauu

SEQ ID NO: 294 - RNA, 1303 nt, Artificial Sequence
  IL12B(23-328) mRNA product TOP UTR opt1
ggggcgcugccuacggagguggcagccaucuccuucucggcaucaagcuuaccaucugggagcucaagaaggacguguacgucguggagcuggacugguacccggacgcgcccggcgagauggugguccugaccugcgacacccccgaggaggacgggaucacguggacccucgaccaguccagcgaggugcugggcuccgggaagacccugaccauccaggugaaggaguucggcgacgccgggcaguacacgugccacaagggcggcgagguccucagccacucccugcugcuccugcacaagaaggaggacgggaucuggagcaccgacauccugaaggaccagaaggagcccaagaacaagaccuuccuccgcugcgaggccaagaacuacuccggccgguucacgugcugguggcugaccaccaucagcaccgaccugaccuucuccgucaagagcucccgcgggagcuccgacccgcagggcgugacgugcggggccgccacccucagcgcggagcgggugcgcggcgacaacaaggaguacgaguacuccguggagugccaggaggacagcgccugccccgccgccgaggagucccugcccaucgaggugauggucgacgcggugcacaagcugaaguacgagaacuacaccagcagcuucuucauccgggacaucaucaagcccgacccgcccaagaaccuccagcugaagccccugaagaacucccgccagguggaggucagcugggaguaccccgacaccugguccacgccgcacagcuacuucucccucaccuucugcguccaggugcagggcaagagcaagcgggagaagaaggaccgcguguucaccgacaagaccuccgccacggugaucugccggaagaacgccagcaucuccgugcgcgcccaggaccgguacuacagcuccagcugguccgagugggccagcguccccugcuccugaggacuagugcaucacauuuaaaagcaucucagccuaccaugagaauaagagaaagaaaaugaagaucaauagcuuauucaucucuuuuucuuuuucguugguguaaagccaacacccugucuaaaaaacauaaauuucuuuaaucauuuugccucuuuucucugugcuucaauuaauaaaaaauggaaagaaccuagaucuaaaaaaaaaaaaaaaaaaaaaaaaaaaaaaaaaaaaaaaaaaaaaaaaaaaaaaaaaaaaaaaaugcaucccccccccccccccccccccccccccccccaaaggcucuuuucagagccaccagaauu

SEQ ID NO: 295 - RNA, 436 nt, Artificial Sequence
  Linker-sFvCC49-218 mRNA product TOP UTR opt1
ggggcgcugccuacggagguggcagccaucuccuucucggcaucaagcuuaccggcagcaccuccgggagcggcaagcccggguccggcgaggggagcaccaagggcggacuagugcaucacauuuaaaagcaucucagccuaccaugagaauaagagaaagaaaaugaagaucaauagcuuauucaucucuuuuucuuuuucguugguguaaagccaacacccugucuaaaaaacauaaauuucuuuaaucauuuugccucuuuucucugugcuucaauuaauaaaaaauggaaagaaccuagaucuaaaaaaaaaaaaaaaaaaaaaaaaaaaaaaaaaaaaaaaaaaaaaaaaaaaaaaaaaaaaaaaaugcaucccccccccccccccccccccccccccccccaaaggcucuuuucagagccaccagaauu

SEQ ID NO: 296 - RNA, 2014 nt, Artificial Sequence
  IL12 mRNA product TOP UTR opt1
ggggcgcugccuacggagguggcagccaucuccuucucggcaucaagcuuaccaugugccaccagcagcuggugaucagcugguucucccucgucuuccuggccagcccccugguggccaucugggagcucaagaaggacguguacgucguggagcuggacugguacccggacgcgcccggcgagauggugguccugaccugcgacacccccgaggaggacgggaucacguggacccucgaccaguccagcgaggugcugggcuccgggaagacccugaccauccaggugaaggaguucggcgacgccgggcaguacacgugccacaagggcggcgagguccucagccacucccugcugcuccugcacaagaaggaggacgggaucuggagcaccgacauccugaaggaccagaaggagcccaagaacaagaccuuccuccgcugcgaggccaagaacuacuccggccgguucacgugcugguggcugaccaccaucagcaccgaccugaccuucuccgucaagagcucccgcgggagcuccgacccgcagggcgugacgugcggggccgccacccucagcgcggagcgggugcgcggcgacaacaaggaguacgaguacuccguggagugccaggaggacagcgccugccccgccgccgaggagucccugcccaucgaggugauggucgacgcggugcacaagcugaaguacgagaacuacaccagcagcuucuucauccgggacaucaucaagcccgacccgcccaagaaccuccagcugaagccccugaagaacucccgccagguggaggucagcugggaguaccccgacaccugguccacgccgcacagcuacuucucccucaccuucugcguccaggugcagggcaagagcaagcgggagaagaaggaccgcguguucaccgacaagaccuccgccacggugaucugccggaagaacgccagcaucuccgugcgcgcccaggaccgguacuacagcuccagcugguccgagugggccagcguccccugcuccggcagcaccuccgggagcggcaagcccggguccggcgaggggagcaccaagggccggaaccugccgguggccacccccgaccccggcauguuccccugccugcaccacagccagaaccuccugcgcgccguguccaacaugcugcagaaggcccggcagacgcucgaguucuacccgugcaccagcgaggagaucgaccacgaggacaucaccaaggacaagaccuccacggucgaggccugccugccccuggagcucaccaagaacgagagcugccugaacucccgcgagaccagcuucaucaccaacggguccugccuggcgagccggaagacguccuucaugauggcccucugccugagcuccaucuacgaggaccugaagauguaccagguggaguucaagaccaugaacgccaagcuccugauggaccccaagcgccagaucuuccuggaccagaacaugcucgccgugaucgacgagcugaugcaggcgcugaacuucaacagcgagaccgucccccagaaguccagccucgaggagccggacuucuacaagaccaagaucaagcugugcauccugcuccacgccuuccggauccgcgccgugacgaucgaccgggugauguccuaccugaacgccagcugaggacuagugcaucacauuuaaaagcaucucagccuaccaugagaauaagagaaagaaaaugaagaucaauagcuuauucaucucuuuuucuuuuucguugguguaaagccaacacccugucuaaaaaacauaaauuucuuuaaucauuuugccucuuuucucugugcuucaauuaauaaaaaauggaaagaaccuagaucuaaaaaaaaaaaaaaaaaaaaaaaaaaaaaaaaaaaaaaaaaaaaaaaaaaaaaaaaaaaaaaaaugcaucccccccccccccccccccccccccccccccaaaggcucuuuucagagccaccagaauu

SEQ ID NO: 297 - RNA, 1168 nt, Artificial Sequence
  CD40LG mRNA product TOP UTR opt1
ggggcgcugccuacggagguggcagccaucuccuucucggcaucaagcuuaccaugaucgagaccuacaaccagaccagcccccgcuccgccgccacgggccugccgaucagcaugaagaucuucauguaccuccugaccguguuccugaucacccagaugaucggguccgcgcuguucgccgucuaccugcaccggcgccuggacaagaucgaggacgagcggaaccuccacgaggacuucguguucaugaagaccauccagcgcugcaacacgggcgagcggagccugucccugcucaacugcgaggagaucaagagccaguucgagggguucgugaaggacaucaugcugaacaaggaggagaccaagaaggagaacuccuucgagaugcagaagggcgaccagaacccccagaucgccgcccacgucaucagcgaggccuccagcaagaccaccuccgugcugcagugggcggagaagggguacuacacgaugagcaacaaccucgugacccuggagaacggcaagcagcugaccgucaagcgccagggccucuacuacaucuacgcccaggugaccuucugcuccaaccgggaggccagcucccaggcccccuucaucgcgagccugugccugaagucccccgggcgcuucgagcggauccuccugcgcgccgccaacacgcacagcuccgccaagccgugcggccagcagagcauccaccucgggggcguguucgagcuccagcccggggccagcgucuucgugaacgugaccgaccccucccaggucagccacggcaccggcuucaccuccuucgggcugcugaagcucugaggacuagugcaucacauuuaaaagcaucucagccuaccaugagaauaagagaaagaaaaugaagaucaauagcuuauucaucucuuuuucuuuuucguugguguaaagccaacacccugucuaaaaaacauaaauuucuuuaaucauuuugccucuuuucucugugcuucaauuaauaaaaaauggaaagaaccuagaucuaaaaaaaaaaaaaaaaaaaaaaaaaaaaaaaaaaaaaaaaaaaaaaaaaaaaaaaaaaaaaaaaugcaucccccccccccccccccccccccccccccccaaaggcucuuuucagagccaccagaauu

SEQ ID NO: 298 - RNA, 1249 nt, Artificial Sequence
  PDCD1 mRNA product TOP UTR opt2
ggggcgcugccuacggagguggcagccaucuccuucucggcaucaagcuuaccaugcagaucccccaggcccccuggcccgucgucugggccguccuccagcucggcuggcgccccggcugguuccucgacucccccgaccgccccuggaacccccccaccuucucccccgcccuccucgucgucaccgagggcgacaacgccaccuucaccuguuccuucuccaacaccuccgaguccuucguccucaacugguaccgcaugucccccuccaaccagaccgacaagcucgccgccuuccccgaggaccgcucccagcccggccaggacugccgcuuccgcgucacccagcuccccaacggccgcgacuuccacauguccgucguccgcgcccgccgcaacgacuccggcaccuaccucugcggcgccaucucccucgcccccaaggcccagaucaaggagucccuccgcgccgagcuccgcgucaccgagcgccgcgccgagguccccaccgcccaccccucccccuccccccgccccgccggccaguuccagacccucgucgucggcgucgucggcggccuccucggcucccucguccuccucgucuggguccucgccgucaucugcucccgcgccgcccgcggcaccaucggcgcccgccgcaccggccagccccucaaggaggaccccuccgccguccccgucuucuccgucgacuacggcgagcucgacuuccaguggcgcgagaagacccccgagccccccguccccugcguccccgagcagaccgaguacgccaccaucgucuuccccuccggcaugggcaccuccucccccgcccgccgcggcuccgccgacggcccccgcuccgcccagccccuccgccccgaggacggccacugcuccuggccccucugaggacuagugcaucacauuuaaaagcaucucagccuaccaugagaauaagagaaagaaaaugaagaucaauagcuuauucaucucuuuuucuuuuucguugguguaaagccaacacccugucuaaaaaacauaaauuucuuuaaucauuuugccucuuuucucugugcuucaauuaauaaaaaauggaaagaaccuagaucuaaaaaaaaaaaaaaaaaaaaaaaaaaaaaaaaaaaaaaaaaaaaaaaaaaaaaaaaaaaaaaaaugcaucccccccccccccccccccccccccccccccaaaggcucuuuucagagccaccagaauu

SEQ ID NO: 299 - RNA, 832 nt, Artificial Sequence
  PDCD1(1-149) mRNA product TOP UTR opt2
ggggcgcugccuacggagguggcagccaucuccuucucggcaucaagcuuaccaugcagaucccccaggcccccuggcccgucgucugggccguccuccagcucggcuggcgccccggcugguuccucgacucccccgaccgccccuggaacccccccaccuucucccccgcccuccucgucgucaccgagggcgacaacgccaccuucaccuguuccuucuccaacaccuccgaguccuucguccucaacugguaccgcaugucccccuccaaccagaccgacaagcucgccgccuuccccgaggaccgcucccagcccggccaggacugccgcuuccgcgucacccagcuccccaacggccgcgacuuccacauguccgucguccgcgcccgccgcaacgacuccggcaccuaccucugcggcgccaucucccucgcccccaaggcccagaucaaggagucccuccgcgccgagcuccgcgucaccgagcgccgcgccugaggacuagugcaucacauuuaaaagcaucucagccuaccaugagaauaagagaaagaaaaugaagaucaauagcuuauucaucucuuuuucuuuuucguugguguaaagccaacacccugucuaaaaaacauaaauuucuuuaaucauuuugccucuuuucucugugcuucaauuaauaaaaaauggaaagaaccuagaucuaaaaaaaaaaaaaaaaaaaaaaaaaaaaaaaaaaaaaaaaaaaaaaaaaaaaaaaaaaaaaaaaugcaucccccccccccccccccccccccccccccccaaaggcucuuuucagagccaccagaauu

SEQ ID NO: 300 - RNA, 1042 nt, Artificial Sequence
  IL12A mRNA product TOP UTR opt2
ggggcgcugccuacggagguggcagccaucuccuucucggcaucaagcuuaccaugugccccgcccgcucccuccuccucgucgccacccucguccuccucgaccaccucucccucgcccgcaaccuccccgucgccacccccgaccccggcauguuccccugccuccaccacucccagaaccuccuccgcgccgucuccaacaugcuccagaaggcccgccagacccucgaguucuaccccugcaccuccgaggagaucgaccacgaggacaucaccaaggacaagaccuccaccgucgaggccugccucccccucgagcucaccaagaacgaguccugccucaacucccgcgagaccuccuucaucaccaacggcuccugccucgccucccgcaagaccuccuucaugauggcccucugccucuccuccaucuacgaggaccucaagauguaccaggucgaguucaagaccaugaacgccaagcuccucauggaccccaagcgccagaucuuccucgaccagaacaugcucgccgucaucgacgagcucaugcaggcccucaacuucaacuccgagaccgucccccagaaguccucccucgaggagcccgacuucuacaagaccaagaucaagcucugcauccuccuccacgccuuccgcauccgcgccgucaccaucgaccgcgucauguccuaccucaacgccuccugaggacuagugcaucacauuuaaaagcaucucagccuaccaugagaauaagagaaagaaaaugaagaucaauagcuuauucaucucuuuuucuuuuucguugguguaaagccaacacccugucuaaaaaacauaaauuucuuuaaucauuuugccucuuuucucugugcuucaauuaauaaaaaauggaaagaaccuagaucuaaaaaaaaaaaaaaaaaaaaaaaaaaaaaaaaaaaaaaaaaaaaaaaaaaaaaaaaaaaaaaaaugcaucccccccccccccccccccccccccccccccaaaggcucuuuucagagccaccagaauu

SEQ ID NO: 301 - RNA, 1039 nt, Artificial Sequence
  IL12A(1-219) mRNA product TOP UTR opt2
ggggcgcugccuacggagguggcagccaucuccuucucggcaucaagcuuaccaugugccccgcccgcucccuccuccucgucgccacccucguccuccucgaccaccucucccucgcccgcaaccuccccgucgccacccccgaccccggcauguuccccugccuccaccacucccagaaccuccuccgcgccgucuccaacaugcuccagaaggcccgccagacccucgaguucuaccccugcaccuccgaggagaucgaccacgaggacaucaccaaggacaagaccuccaccgucgaggccugccucccccucgagcucaccaagaacgaguccugccucaacucccgcgagaccuccuucaucaccaacggcuccugccucgccucccgcaagaccuccuucaugauggcccucugccucuccuccaucuacgaggaccucaagauguaccaggucgaguucaagaccaugaacgccaagcuccucauggaccccaagcgccagaucuuccucgaccagaacaugcucgccgucaucgacgagcucaugcaggcccucaacuucaacuccgagaccgucccccagaaguccucccucgaggagcccgacuucuacaagaccaagaucaagcucugcauccuccuccacgccuuccgcauccgcgccgucaccaucgaccgcgucauguccuaccucaacgccuccggacuagugcaucacauuuaaaagcaucucagccuaccaugagaauaagagaaagaaaaugaagaucaauagcuuauucaucucuuuuucuuuuucguugguguaaagccaacacccugucuaaaaaacauaaauuucuuuaaucauuuugccucuuuucucugugcuucaauuaauaaaaaauggaaagaaccuagaucuaaaaaaaaaaaaaaaaaaaaaaaaaaaaaaaaaaaaaaaaaaaaaaaaaaaaaaaaaaaaaaaaugcaucccccccccccccccccccccccccccccccaaaggcucuuuucagagccaccagaauu

SEQ ID NO: 302 - RNA, 976 nt, Artificial Sequence
  IL12A(23-219) mRNA product TOP UTR opt2
ggggcgcugccuacggagguggcagccaucuccuucucggcaucaagcuuacccgcaaccuccccgucgccacccccgaccccggcauguuccccugccuccaccacucccagaaccuccuccgcgccgucuccaacaugcuccagaaggcccgccagacccucgaguucuaccccugcaccuccgaggagaucgaccacgaggacaucaccaaggacaagaccuccaccgucgaggccugccucccccucgagcucaccaagaacgaguccugccucaacucccgcgagaccuccuucaucaccaacggcuccugccucgccucccgcaagaccuccuucaugauggcccucugccucuccuccaucuacgaggaccucaagauguaccaggucgaguucaagaccaugaacgccaagcuccucauggaccccaagcgccagaucuuccucgaccagaacaugcucgccgucaucgacgagcucaugcaggcccucaacuucaacuccgagaccgucccccagaaguccucccucgaggagcccgacuucuacaagaccaagaucaagcucugcauccuccuccacgccuuccgcauccgcgccgucaccaucgaccgcgucauguccuaccucaacgccuccugaggacuagugcaucacauuuaaaagcaucucagccuaccaugagaauaagagaaagaaaaugaagaucaauagcuuauucaucucuuuuucuuuuucguugguguaaagccaacacccugucuaaaaaacauaaauuucuuuaaucauuuugccucuuuucucugugcuucaauuaauaaaaaauggaaagaaccuagaucuaaaaaaaaaaaaaaaaaaaaaaaaaaaaaaaaaaaaaaaaaaaaaaaaaaaaaaaaaaaaaaaaugcaucccccccccccccccccccccccccccccccaaaggcucuuuucagagccaccagaauu

SEQ ID NO: 303 - RNA, 1369 nt, Artificial Sequence
  IL12B mRNA product TOP UTR opt2
ggggcgcugccuacggagguggcagccaucuccuucucggcaucaagcuuaccaugugccaccagcagcucgucaucuccugguucucccucgucuuccucgccuccccccucgucgccaucugggagcucaagaaggacgucuacgucgucgagcucgacugguaccccgacgcccccggcgagauggucguccucaccugugacacccccgaggaggacggcaucaccuggacccucgaccaguccuccgagguccucggcuccggcaagacccucaccauccaggucaaggaguucggcgacgccggccaguacaccugucacaagggcggcgagguccucucccacucccuccuccuccuccacaagaaggaggacggcaucugguccaccgacauccucaaggaccagaaggagcccaagaacaagaccuuccuccgcugcgaggccaagaacuacuccggccgcuucaccuguugguggcucaccaccaucuccaccgaccucaccuucuccgucaaguccucccgcggcuccuccgacccccagggcgucaccuguggcgccgccacccucuccgccgagcgcguccgcggcgacaacaaggaguacgaguacuccgucgagugccaggaggacuccgccugccccgccgccgaggagucccuccccaucgaggucauggucgacgccguccacaagcucaaguacgagaacuacaccuccuccuucuucauccgcgacaucaucaagcccgacccccccaagaaccuccagcucaagccccucaagaacucccgccaggucgaggucuccugggaguaccccgacaccugguccaccccccacuccuacuucucccucaccuucugcguccagguccagggcaaguccaagcgcgagaagaaggaccgcgucuucaccgacaagaccuccgccaccgucaucugccgcaagaacgccuccaucuccguccgcgcccaggaccgcuacuacuccuccuccugguccgagugggccuccguccccugcuccugaggacuagugcaucacauuuaaaagcaucucagccuaccaugagaauaagagaaagaaaaugaagaucaauagcuuauucaucucuuuuucuuuuucguugguguaaagccaacacccugucuaaaaaacauaaauuucuuuaaucauuuugccucuuuucucugugcuucaauuaauaaaaaauggaaagaaccuagaucuaaaaaaaaaaaaaaaaaaaaaaaaaaaaaaaaaaaaaaaaaaaaaaaaaaaaaaaaaaaaaaaaugcaucccccccccccccccccccccccccccccccaaaggcucuuuucagagccaccagaauu

SEQ ID NO: 304 - RNA, 1366 nt, Artificial Sequence
  IL12B(1-328) mRNA product TOP UTR opt2
ggggcgcugccuacggagguggcagccaucuccuucucggcaucaagcuuaccaugugccaccagcagcucgucaucuccugguucucccucgucuuccucgccuccccccucgucgccaucugggagcucaagaaggacgucuacgucgucgagcucgacugguaccccgacgcccccggcgagauggucguccucaccugugacacccccgaggaggacggcaucaccuggacccucgaccaguccuccgagguccucggcuccggcaagacccucaccauccaggucaaggaguucggcgacgccggccaguacaccugucacaagggcggcgagguccucucccacucccuccuccuccuccacaagaaggaggacggcaucugguccaccgacauccucaaggaccagaaggagcccaagaacaagaccuuccuccgcugcgaggccaagaacuacuccggccgcuucaccuguugguggcucaccaccaucuccaccgaccucaccuucuccgucaaguccucccgcggcuccuccgacccccagggcgucaccuguggcgccgccacccucuccgccgagcgcguccgcggcgacaacaaggaguacgaguacuccgucgagugccaggaggacuccgccugccccgccgccgaggagucccuccccaucgaggucauggucgacgccguccacaagcucaaguacgagaacuacaccuccuccuucuucauccgcgacaucaucaagcccgacccccccaagaaccuccagcucaagccccucaagaacucccgccaggucgaggucuccugggaguaccccgacaccugguccaccccccacuccuacuucucccucaccuucugcguccagguccagggcaaguccaagcgcgagaagaaggaccgcgucuucaccgacaagaccuccgccaccgucaucugccgcaagaacgccuccaucuccguccgcgcccaggaccgcuacuacuccuccuccugguccgagugggccuccguccccugcuccggacuagugcaucacauuuaaaagcaucucagccuaccaugagaauaagagaaagaaaaugaagaucaauagcuuauucaucucuuuuucuuuuucguugguguaaagccaacacccugucuaaaaaacauaaauuucuuuaaucauuuugccucuuuucucugugcuucaauuaauaaaaaauggaaagaaccuagaucuaaaaaaaaaaaaaaaaaaaaaaaaaaaaaaaaaaaaaaaaaaaaaaaaaaaaaaaaaaaaaaaaugcaucccccccccccccccccccccccccccccccaaaggcucuuuucagagccaccagaauu

SEQ ID NO: 305 - RNA, 1303 nt, Artificial Sequence
  IL12B(23-328) mRNA product TOP UTR opt2
ggggcgcugccuacggagguggcagccaucuccuucucggcaucaagcuuaccaucugggagcucaagaaggacgucuacgucgucgagcucgacugguaccccgacgcccccggcgagauggucguccucaccugugacacccccgaggaggacggcaucaccuggacccucgaccaguccuccgagguccucggcuccggcaagacccucaccauccaggucaaggaguucggcgacgccggccaguacaccugucacaagggcggcgagguccucucccacucccuccuccuccuccacaagaaggaggacggcaucugguccaccgacauccucaaggaccagaaggagcccaagaacaagaccuuccuccgcugcgaggccaagaacuacuccggccgcuucaccuguugguggcucaccaccaucuccaccgaccucaccuucuccgucaaguccucccgcggcuccuccgacccccagggcgucaccuguggcgccgccacccucuccgccgagcgcguccgcggcgacaacaaggaguacgaguacuccgucgagugccaggaggacuccgccugccccgccgccgaggagucccuccccaucgaggucauggucgacgccguccacaagcucaaguacgagaacuacaccuccuccuucuucauccgcgacaucaucaagcccgacccccccaagaaccuccagcucaagccccucaagaacucccgccaggucgaggucuccugggaguaccccgacaccugguccaccccccacuccuacuucucccucaccuucugcguccagguccagggcaaguccaagcgcgagaagaaggaccgcgucuucaccgacaagaccuccgccaccgucaucugccgcaagaacgccuccaucuccguccgcgcccaggaccgcuacuacuccuccuccugguccgagugggccuccguccccugcuccugaggacuagugcaucacauuuaaaagcaucucagccuaccaugagaauaagagaaagaaaaugaagaucaauagcuuauucaucucuuuuucuuuuucguugguguaaagccaacacccugucuaaaaaacauaaauuucuuuaaucauuuugccucuuuucucugugcuucaauuaauaaaaaauggaaagaaccuagaucuaaaaaaaaaaaaaaaaaaaaaaaaaaaaaaaaaaaaaaaaaaaaaaaaaaaaaaaaaaaaaaaaugcaucccccccccccccccccccccccccccccccaaaggcucuuuucagagccaccagaauu

SEQ ID NO: 306 - RNA, 436 nt, Artificial Sequence
  Linker-sFvCC49-218 mRNA product TOP UTR opt2
ggggcgcugccuacggagguggcagccaucuccuucucggcaucaagcuuaccggcuccaccuccggcuccggcaagcccggcuccggcgagggcuccaccaagggcggacuagugcaucacauuuaaaagcaucucagccuaccaugagaauaagagaaagaaaaugaagaucaauagcuuauucaucucuuuuucuuuuucguugguguaaagccaacacccugucuaaaaaacauaaauuucuuuaaucauuuugccucuuuucucugugcuucaauuaauaaaaaauggaaagaaccuagaucuaaaaaaaaaaaaaaaaaaaaaaaaaaaaaaaaaaaaaaaaaaaaaaaaaaaaaaaaaaaaaaaaugcaucccccccccccccccccccccccccccccccaaaggcucuuuucagagccaccagaauu

SEQ ID NO: 307 - RNA, 2014 nt, Artificial Sequence
  IL12 mRNA product TOP UTR opt2
ggggcgcugccuacggagguggcagccaucuccuucucggcaucaagcuuaccaugugccaccagcagcucgucaucuccugguucucccucgucuuccucgccuccccccucgucgccaucugggagcucaagaaggacgucuacgucgucgagcucgacugguaccccgacgcccccggcgagauggucguccucaccugugacacccccgaggaggacggcaucaccuggacccucgaccaguccuccgagguccucggcuccggcaagacccucaccauccaggucaaggaguucggcgacgccggccaguacaccugucacaagggcggcgagguccucucccacucccuccuccuccuccacaagaaggaggacggcaucugguccaccgacauccucaaggaccagaaggagcccaagaacaagaccuuccuccgcugcgaggccaagaacuacuccggccgcuucaccuguugguggcucaccaccaucuccaccgaccucaccuucuccgucaaguccucccgcggcuccuccgacccccagggcgucaccuguggcgccgccacccucuccgccgagcgcguccgcggcgacaacaaggaguacgaguacuccgucgagugccaggaggacuccgccugccccgccgccgaggagucccuccccaucgaggucauggucgacgccguccacaagcucaaguacgagaacuacaccuccuccuucuucauccgcgacaucaucaagcccgacccccccaagaaccuccagcucaagccccucaagaacucccgccaggucgaggucuccugggaguaccccgacaccugguccaccccccacuccuacuucucccucaccuucugcguccagguccagggcaaguccaagcgcgagaagaaggaccgcgucuucaccgacaagaccuccgccaccgucaucugccgcaagaacgccuccaucuccguccgcgcccaggaccgcuacuacuccuccuccugguccgagugggccuccguccccugcuccggcuccaccuccggcuccggcaagcccggcuccggcgagggcuccaccaagggccgcaaccuccccgucgccacccccgaccccggcauguuccccugccuccaccacucccagaaccuccuccgcgccgucuccaacaugcuccagaaggcccgccagacccucgaguucuaccccugcaccuccgaggagaucgaccacgaggacaucaccaaggacaagaccuccaccgucgaggccugccucccccucgagcucaccaagaacgaguccugccucaacucccgcgagaccuccuucaucaccaacggcuccugccucgccucccgcaagaccuccuucaugauggcccucugccucuccuccaucuacgaggaccucaagauguaccaggucgaguucaagaccaugaacgccaagcuccucauggaccccaagcgccagaucuuccucgaccagaacaugcucgccgucaucgacgagcucaugcaggcccucaacuucaacuccgagaccgucccccagaaguccucccucgaggagcccgacuucuacaagaccaagaucaagcucugcauccuccuccacgccuuccgcauccgcgccgucaccaucgaccgcgucauguccuaccucaacgccuccugaggacuagugcaucacauuuaaaagcaucucagccuaccaugagaauaagagaaagaaaaugaagaucaauagcuuauucaucucuuuuucuuuuucguugguguaaagccaacacccugucuaaaaaacauaaauuucuuuaaucauuuugccucuuuucucugugcuucaauuaauaaaaaauggaaagaaccuagaucuaaaaaaaaaaaaaaaaaaaaaaaaaaaaaaaaaaaaaaaaaaaaaaaaaaaaaaaaaaaaaaaaugcaucccccccccccccccccccccccccccccccaaaggcucuuuucagagccaccagaauu

SEQ ID NO: 308 - RNA, 1168 nt, Artificial Sequence
  CD40LG mRNA product TOP UTR opt2
ggggcgcugccuacggagguggcagccaucuccuucucggcaucaagcuuaccaugaucgagaccuacaaccagaccuccccccgcuccgccgccaccggccuccccaucuccaugaagaucuucauguaccuccucaccgucuuccucaucacccagaugaucggcuccgcccucuucgccgucuaccuccaccgccgccucgacaagaucgaggacgagcgcaaccuccacgaggacuucgucuucaugaagaccauccagcgcugcaacaccggcgagcgcucccucucccuccucaacugcgaggagaucaagucccaguucgagggcuucgucaaggacaucaugcucaacaaggaggagaccaagaaggagaacuccuucgagaugcagaagggcgaccagaacccccagaucgccgcccacgucaucuccgaggccuccuccaagaccaccuccguccuccagugggccgagaagggcuacuacaccauguccaacaaccucgucacccucgagaacggcaagcagcucaccgucaagcgccagggccucuacuacaucuacgcccaggucaccuucugcuccaaccgcgaggccuccucccaggcccccuucaucgccucccucugccucaagucccccggccgcuucgagcgcauccuccuccgcgccgccaacacccacuccuccgccaagcccugcggccagcaguccauccaccucggcggcgucuucgagcuccagcccggcgccuccgucuucgucaacgucaccgaccccucccaggucucccacggcaccggcuucaccuccuucggccuccucaagcucugaggacuagugcaucacauuuaaaagcaucucagccuaccaugagaauaagagaaagaaaaugaagaucaauagcuuauucaucucuuuuucuuuuucguugguguaaagccaacacccugucuaaaaaacauaaauuucuuuaaucauuuugccucuuuucucugugcuucaauuaauaaaaaauggaaagaaccuagaucuaaaaaaaaaaaaaaaaaaaaaaaaaaaaaaaaaaaaaaaaaaaaaaaaaaaaaaaaaaaaaaaaugcaucccccccccccccccccccccccccccccccaaaggcucuuuucagagccaccagaauu

SEQ ID NO: 309 - RNA, 1249 nt, Artificial Sequence
  PDCD1 mRNA product TOP UTR opt3
ggggcgcugccuacggagguggcagccaucuccuucucggcaucaagcuuaccaugcagaucccccaagccccuuggccaguggucugggcuguucugcagcucggcuggagaccggggugguuccuugacagccccgauaggccuuggaacccacccaccuuuuccccugcacuguuggugguaacagagggagacaaugccacuuucacgugcucuuuuucaaacaccagugagagcuucguguuaaauugguaccggauguccccaucuaaccagacagauaagcuggcggcuuuucccgaagaccgcucgcagccuggucaagauugucgauuccgugucacucagcuaccaaauggcagagacuuucacaugucagugguuagggcccggcgcaacgauagcgggaccuaucucugcggagcaauuagucuggccccgaaagcucagauaaaggaaucccuuagagcagagcugagggugacagaacggcgcgccgagguccccaccgcucauccuucuccaagcccccgaccugccggccaguuccaaacuuuggugguagguguugucgggggacuccugggcucccuggugcucuuagugugggugcuggcggucaucuguucaagagcagccaggggcacaauuggggcucggcguaccggacagccacuuaaagaggaccccagugccguuccgguguuuagcguagauuacggugaauuggacuuccaguggcgcgagaagacgccugaacccccagugccuugcguccccgagcagacugaguaugcaaccaucguguuuccaucuggcauggggacauccucacccgcuagaaggggaagcgccgauggcccucggagugcgcaaccacugcgaccggaagacggucacuguucuuggccccuaugaggacuagugcaucacauuuaaaagcaucucagccuaccaugagaauaagagaaagaaaaugaagaucaauagcuuauucaucucuuuuucuuuuucguugguguaaagccaacacccugucuaaaaaacauaaauuucuuuaaucauuuugccucuuuucucugugcuucaauuaauaaaaaauggaaagaaccuagaucuaaaaaaaaaaaaaaaaaaaaaaaaaaaaaaaaaaaaaaaaaaaaaaaaaaaaaaaaaaaaaaaaugcaucccccccccccccccccccccccccccccccaaaggcucuuuucagagccaccagaauu

SEQ ID NO: 310 - RNA, 832 nt, Artificial Sequence
  PDCD1(1-149) mRNA product TOP UTR opt3
ggggcgcugccuacggagguggcagccaucuccuucucggcaucaagcuuaccaugcagaucccccaagccccuuggccaguggucugggcuguucugcagcucggcuggagaccggggugguuccuugacagccccgauaggccuuggaacccacccaccuuuuccccugcacuguuggugguaacagagggagacaaugccacuuucacgugcucuuuuucaaacaccagugagagcuucguguuaaauugguaccggauguccccaucuaaccagacagauaagcuggcggcuuuucccgaagaccgcucgcagccuggucaagauugucgauuccgugucacucagcuaccaaauggcagagacuuucacaugucagugguuagggcccggcgcaacgauagcgggaccuaucucugcggagcaauuagucuggccccgaaagcucagauaaaggaaucccuuagagcagagcugagggugacagaacggcgcgccugaggacuagugcaucacauuuaaaagcaucucagccuaccaugagaauaagagaaagaaaaugaagaucaauagcuuauucaucucuuuuucuuuuucguugguguaaagccaacacccugucuaaaaaacauaaauuucuuuaaucauuuugccucuuuucucugugcuucaauuaauaaaaaauggaaagaaccuagaucuaaaaaaaaaaaaaaaaaaaaaaaaaaaaaaaaaaaaaaaaaaaaaaaaaaaaaaaaaaaaaaaaugcaucccccccccccccccccccccccccccccccaaaggcucuuuucagagccaccagaauu

SEQ ID NO: 311 - RNA, 1042 nt, Artificial Sequence
  IL12A mRNA product TOP UTR opt3
ggggcgcugccuacggagguggcagccaucuccuucucggcaucaagcuuaccaugugccccgccagaagccugcuccuuguggcuacccuggucuuguuagaccaccugucccuagcaaggaaccucccuguugccacaccagauccgggcauguuccccugucugcaucacucucagaaucuucugcgggcggugucaaacauguugcaaaaggcucgccagacucucgaguuuuacccuugcacgagugaagagaucgaccaugaagauauuaccaaagacaagacaagcacuguagaggccugucugccacuggaacucaccaaaaaugaguccugcuuaaacucucgagagacaucguucauaaccaaugggucaugucuggcaagccguaagacaaguuuuaugauggcccuuugcuuguccucuaucuaugaagaucugaaaauguaccagguggaguucaagacuaugaacgcuaagcuacucauggaccccaaaagacagauuuuucuggaucaaaauaugcuugcagucaucgacgaacugaugcaggccuugaacuucaauagcgagaccgugccucagaaguccucacucgaggaaccagauuuuuauaaaacgaagauuaaacuguguaucuuacugcacgcuuucaggauacgggccguuacuaucgaccgcgugaugaguuaccucaacgcgagcugaggacuagugcaucacauuuaaaagcaucucagccuaccaugagaauaagagaaagaaaaugaagaucaauagcuuauucaucucuuuuucuuuuucguugguguaaagccaacacccugucuaaaaaacauaaauuucuuuaaucauuuugccucuuuucucugugcuucaauuaauaaaaaauggaaagaaccuagaucuaaaaaaaaaaaaaaaaaaaaaaaaaaaaaaaaaaaaaaaaaaaaaaaaaaaaaaaaaaaaaaaaugcaucccccccccccccccccccccccccccccccaaaggcucuuuucagagccaccagaauu

SEQ ID NO: 312 - RNA, 1039 nt, Artificial Sequence
  IL12A(1-219) mRNA product TOP UTR opt3
ggggcgcugccuacggagguggcagccaucuccuucucggcaucaagcuuaccaugugccccgccagaagccugcuccuuguggcuacccuggucuuguuagaccaccugucccuagcaaggaaccucccuguugccacaccagauccgggcauguuccccugucugcaucacucucagaaucuucugcgggcggugucaaacauguugcaaaaggcucgccagacucucgaguuuuacccuugcacgagugaagagaucgaccaugaagauauuaccaaagacaagacaagcacuguagaggccugucugccacuggaacucaccaaaaaugaguccugcuuaaacucucgagagacaucguucauaaccaaugggucaugucuggcaagccguaagacaaguuuuaugauggcccuuugcuuguccucuaucuaugaagaucugaaaauguaccagguggaguucaagacuaugaacgcuaagcuacucauggaccccaaaagacagauuuuucuggaucaaaauaugcuugcagucaucgacgaacugaugcaggccuugaacuucaauagcgagaccgugccucagaaguccucacucgaggaaccagauuuuuauaaaacgaagauuaaacuguguaucuuacugcacgcuuucaggauacgggccguuacuaucgaccgcgugaugaguuaccucaacgcgagcggacuagugcaucacauuuaaaagcaucucagccuaccaugagaauaagagaaagaaaaugaagaucaauagcuuauucaucucuuuuucuuuuucguugguguaaagccaacacccugucuaaaaaacauaaauuucuuuaaucauuuugccucuuuucucugugcuucaauuaauaaaaaauggaaagaaccuagaucuaaaaaaaaaaaaaaaaaaaaaaaaaaaaaaaaaaaaaaaaaaaaaaaaaaaaaaaaaaaaaaaaugcaucccccccccccccccccccccccccccccccaaaggcucuuuucagagccaccagaauu

SEQ ID NO: 313 - RNA, 976 nt, Artificial Sequence
  IL12A(23-219) mRNA product TOP UTR opt3
ggggcgcugccuacggagguggcagccaucuccuucucggcaucaagcuuaccaggaaccucccuguugccacaccagauccgggcauguuccccugucugcaucacucucagaaucuucugcgggcggugucaaacauguugcaaaaggcucgccagacucucgaguuuuacccuugcacgagugaagagaucgaccaugaagauauuaccaaagacaagacaagcacuguagaggccugucugccacuggaacucaccaaaaaugaguccugcuuaaacucucgagagacaucguucauaaccaaugggucaugucuggcaagccguaagacaaguuuuaugauggcccuuugcuuguccucuaucuaugaagaucugaaaauguaccagguggaguucaagacuaugaacgcuaagcuacucauggaccccaaaagacagauuuuucuggaucaaaauaugcuugcagucaucgacgaacugaugcaggccuugaacuucaauagcgagaccgugccucagaaguccucacucgaggaaccagauuuuuauaaaacgaagauuaaacuguguaucuuacugcacgcuuucaggauacgggccguuacuaucgaccgcgugaugaguuaccucaacgcgagcugaggacuagugcaucacauuuaaaagcaucucagccuaccaugagaauaagagaaagaaaaugaagaucaauagcuuauucaucucuuuuucuuuuucguugguguaaagccaacacccugucuaaaaaacauaaauuucuuuaaucauuuugccucuuuucucugugcuucaauuaauaaaaaauggaaagaaccuagaucuaaaaaaaaaaaaaaaaaaaaaaaaaaaaaaaaaaaaaaaaaaaaaaaaaaaaaaaaaaaaaaaaugcaucccccccccccccccccccccccccccccccaaaggcucuuuucagagccaccagaauu

SEQ ID NO: 314 - RNA, 1369 nt, Artificial Sequence
  IL12B mRNA product TOP UTR opt3
ggggcgcugccuacggagguggcagccaucuccuucucggcaucaagcuuaccaugugccaccagcaacuggugaucagcugguucucccucgucuuucuugccucuccccugguugcuauuugggaguugaagaaagacguguacguaguggaauuagauugguauccugacgcaccaggcgagauggucgugcugaccugugauacaccggaagaggacgggauaacuuggacgcuagaucagucaagugaaguucucggaagcgguaagacccugacaauccaggugaaagaguucggcgacgccgggcaguacacuugccauaagggaggcgagguccuuucccacucucuguugcuccugcauaaaaaggaagaugguauuuggucgaccgacauccugaaggaucaaaaagagcccaagaacaaaacauuucucagaugugaagcgaagaauuauucagggagguuuaccugcuggugguuaacuacaauuagcaccgaccugacguucagugugaaauccucucggggaagcuccgauccucagggcguaacuuguggcgcugccacccuuucagcagagcgcguucgaggggacaacaaggaguacgaauauaguguggagugccaggaagauagcgccuguccagcugcagaggaaucuuugcccaucgaggucaugguggacgccgugcacaagcugaaauacgagaauuauacauccucauucuuuauacgugacaucauuaagccugauccacccaaaaaccuacagcucaagccucugaaaaauagcagacaagucgaaguuaguugggaguacccagacacuuggucuaccccgcauuccuacuucagccuuacauuuugcgugcagguacagggaaagucgaaaagggaaaagaaggaucggguguucaccgacaaaacgucugcuacugucaucugucgcaagaacgccuccauuucagugagagcgcaggauagguauuacaguagcuccuggucugagugggcaagcguucccugcucaugaggacuagugcaucacauuuaaaagcaucucagccuaccaugagaauaagagaaagaaaaugaagaucaauagcuuauucaucucuuuuucuuuuucguugguguaaagccaacacccugucuaaaaaacauaaauuucuuuaaucauuuugccucuuuucucugugcuucaauuaauaaaaaauggaaagaaccuagaucuaaaaaaaaaaaaaaaaaaaaaaaaaaaaaaaaaaaaaaaaaaaaaaaaaaaaaaaaaaaaaaaaugcaucccccccccccccccccccccccccccccccaaaggcucuuuucagagccaccagaauu

SEQ ID NO: 315 - RNA, 1366 nt, Artificial Sequence
  IL12B(1-328) mRNA product TOP UTR opt3
ggggcgcugccuacggagguggcagccaucuccuucucggcaucaagcuuaccaugugccaccagcaacuggugaucagcugguucucccucgucuuucuugccucuccccugguugcuauuugggaguugaagaaagacguguacguaguggaauuagauugguauccugacgcaccaggcgagauggucgugcugaccugugauacaccggaagaggacgggauaacuuggacgcuagaucagucaagugaaguucucggaagcgguaagacccugacaauccaggugaaagaguucggcgacgccgggcaguacacuugccauaagggaggcgagguccuuucccacucucuguugcuccugcauaaaaaggaagaugguauuuggucgaccgacauccugaaggaucaaaaagagcccaagaacaaaacauuucucagaugugaagcgaagaauuauucagggagguuuaccugcuggugguuaacuacaauuagcaccgaccugacguucagugugaaauccucucggggaagcuccgauccucagggcguaacuuguggcgcugccacccuuucagcagagcgcguucgaggggacaacaaggaguacgaauauaguguggagugccaggaagauagcgccuguccagcugcagaggaaucuuugcccaucgaggucaugguggacgccgugcacaagcugaaauacgagaauuauacauccucauucuuuauacgugacaucauuaagccugauccacccaaaaaccuacagcucaagccucugaaaaauagcagacaagucgaaguuaguugggaguacccagacacuuggucuaccccgcauuccuacuucagccuuacauuuugcgugcagguacagggaaagucgaaaagggaaaagaaggaucggguguucaccgacaaaacgucugcuacugucaucugucgcaagaacgccuccauuucagugagagcgcaggauagguauuacaguagcuccuggucugagugggcaagcguucccugcucaggacuagugcaucacauuuaaaagcaucucagccuaccaugagaauaagagaaagaaaaugaagaucaauagcuuauucaucucuuuuucuuuuucguugguguaaagccaacacccugucuaaaaaacauaaauuucuuuaaucauuuugccucuuuucucugugcuucaauuaauaaaaaauggaaagaaccuagaucuaaaaaaaaaaaaaaaaaaaaaaaaaaaaaaaaaaaaaaaaaaaaaaaaaaaaaaaaaaaaaaaaugcaucccccccccccccccccccccccccccccccaaaggcucuuuucagagccaccagaauu

SEQ ID NO: 316 - RNA, 1303 nt, Artificial Sequence
  IL12B(23-328) mRNA product TOP UTR opt3
ggggcgcugccuacggagguggcagccaucuccuucucggcaucaagcuuaccauuugggaguugaagaaagacguguacguaguggaauuagauugguauccugacgcaccaggcgagauggucgugcugaccugugauacaccggaagaggacgggauaacuuggacgcuagaucagucaagugaaguucucggaagcgguaagacccugacaauccaggugaaagaguucggcgacgccgggcaguacacuugccauaagggaggcgagguccuuucccacucucuguugcuccugcauaaaaaggaagaugguauuuggucgaccgacauccugaaggaucaaaaagagcccaagaacaaaacauuucucagaugugaagcgaagaauuauucagggagguuuaccugcuggugguuaacuacaauuagcaccgaccugacguucagugugaaauccucucggggaagcuccgauccucagggcguaacuuguggcgcugccacccuuucagcagagcgcguucgaggggacaacaaggaguacgaauauaguguggagugccaggaagauagcgccuguccagcugcagaggaaucuuugcccaucgaggucaugguggacgccgugcacaagcugaaauacgagaauuauacauccucauucuuuauacgugacaucauuaagccugauccacccaaaaaccuacagcucaagccucugaaaaauagcagacaagucgaaguuaguugggaguacccagacacuuggucuaccccgcauuccuacuucagccuuacauuuugcgugcagguacagggaaagucgaaaagggaaaagaaggaucggguguucaccgacaaaacgucugcuacugucaucugucgcaagaacgccuccauuucagugagagcgcaggauagguauuacaguagcuccuggucugagugggcaagcguucccugcucaugaggacuagugcaucacauuuaaaagcaucucagccuaccaugagaauaagagaaagaaaaugaagaucaauagcuuauucaucucuuuuucuuuuucguugguguaaagccaacacccugucuaaaaaacauaaauuucuuuaaucauuuugccucuuuucucugugcuucaauuaauaaaaaauggaaagaaccuagaucuaaaaaaaaaaaaaaaaaaaaaaaaaaaaaaaaaaaaaaaaaaaaaaaaaaaaaaaaaaaaaaaaugcaucccccccccccccccccccccccccccccccaaaggcucuuuucagagccaccagaauu

SEQ ID NO: 317 - RNA, 436 nt, Artificial Sequence
  Linker-sFvCC49-218 mRNA product TOP UTR opt3
ggggcgcugccuacggagguggcagccaucuccuucucggcaucaagcuuaccggcagcaccuccgggucuggaaagcccgguucaggcgaggggaguacaaaaggaggacuagugcaucacauuuaaaagcaucucagccuaccaugagaauaagagaaagaaaaugaagaucaauagcuuauucaucucuuuuucuuuuucguugguguaaagccaacacccugucuaaaaaacauaaauuucuuuaaucauuuugccucuuuucucugugcuucaauuaauaaaaaauggaaagaaccuagaucuaaaaaaaaaaaaaaaaaaaaaaaaaaaaaaaaaaaaaaaaaaaaaaaaaaaaaaaaaaaaaaaaugcaucccccccccccccccccccccccccccccccaaaggcucuuuucagagccaccagaauu

SEQ ID NO: 318 - RNA, 2014 nt, Artificial Sequence
  IL12 mRNA product TOP UTR opt3
ggggcgcugccuacggagguggcagccaucuccuucucggcaucaagcuuaccaugugccaccagcaacuggugaucagcugguucucccucgucuuucuugccucuccccugguugcuauuugggaguugaagaaagacguguacguaguggaauuagauugguauccugacgcaccaggcgagauggucgugcugaccugugauacaccggaagaggacgggauaacuuggacgcuagaucagucaagugaaguucucggaagcgguaagacccugacaauccaggugaaagaguucggcgacgccgggcaguacacuugccauaagggaggcgagguccuuucccacucucuguugcuccugcauaaaaaggaagaugguauuuggucgaccgacauccugaaggaucaaaaagagcccaagaacaaaacauuucucagaugugaagcgaagaauuauucagggagguuuaccugcuggugguuaacuacaauuagcaccgaccugacguucagugugaaauccucucggggaagcuccgauccucagggcguaacuuguggcgcugccacccuuucagcagagcgcguucgaggggacaacaaggaguacgaauauaguguggagugccaggaagauagcgccuguccagcugcagaggaaucuuugcccaucgaggucaugguggacgccgugcacaagcugaaauacgagaauuauacauccucauucuuuauacgugacaucauuaagccugauccacccaaaaaccuacagcucaagccucugaaaaauagcagacaagucgaaguuaguugggaguacccagacacuuggucuaccccgcauuccuacuucagccuuacauuuugcgugcagguacagggaaagucgaaaagggaaaagaaggaucggguguucaccgacaaaacgucugcuacugucaucugucgcaagaacgccuccauuucagugagagcgcaggauagguauuacaguagcuccuggucugagugggcaagcguucccugcucaggcagcaccuccgggucuggaaagcccgguucaggcgaggggaguacaaaaggaaggaaccucccuguugccacaccagauccgggcauguuccccugucugcaucacucucagaaucuucugcgggcggugucaaacauguugcaaaaggcucgccagacucucgaguuuuacccuugcacgagugaagagaucgaccaugaagauauuaccaaagacaagacaagcacuguagaggccugucugccacuggaacucaccaaaaaugaguccugcuuaaacucucgagagacaucguucauaaccaaugggucaugucuggcaagccguaagacaaguuuuaugauggcccuuugcuuguccucuaucuaugaagaucugaaaauguaccagguggaguucaagacuaugaacgcuaagcuacucauggaccccaaaagacagauuuuucuggaucaaaauaugcuugcagucaucgacgaacugaugcaggccuugaacuucaauagcgagaccgugccucagaaguccucacucgaggaaccagauuuuuauaaaacgaagauuaaacuguguaucuuacugcacgcuuucaggauacgggccguuacuaucgaccgcgugaugaguuaccucaacgcgagcugaggacuagugcaucacauuuaaaagcaucucagccuaccaugagaauaagagaaagaaaaugaagaucaauagcuuauucaucucuuuuucuuuuucguugguguaaagccaacacccugucuaaaaaacauaaauuucuuuaaucauuuugccucuuuucucugugcuucaauuaauaaaaaauggaaagaaccuagaucuaaaaaaaaaaaaaaaaaaaaaaaaaaaaaaaaaaaaaaaaaaaaaaaaaaaaaaaaaaaaaaaaugcaucccccccccccccccccccccccccccccccaaaggcucuuuucagagccaccagaauu

SEQ ID NO: 319 - RNA, 1168 nt, Artificial Sequence
  CD40LG mRNA product TOP UTR opt3
ggggcgcugccuacggagguggcagccaucuccuucucggcaucaagcuuaccaugaucgagaccuacaaccagacaagccccagauccgccgcuacuggccugccuauuucuaugaagauauucauguaucuccuuacgguguuucugaucacccaaaugauugggucagcauuguucgccgucuacuuacacaggcggcuggacaaaaucgaagaugagcgcaaucuacaugaagacuuuguuuucaugaagacaauucagcgaugcaacacuggagagcguagucucagccugcuuaauugugaagagaucaaaucccaguuugaggguuucgugaaggauauaaugcugaacaaagaagagaccaagaaggaaaauucuuuugagaugcagaaaggcgaccaaaacccacagaucgcggcucacguaauuucggaggccucaagcaagacaaccaguguguugcagugggcagaaaaaggguauuacacuauguccaauaaccucgucacacuggagaauggaaagcagcugaccgugaaaagacaaggccucuauuacaucuaugcccagguuacguucugcucuaacagggaagcuagcucccaggcaccguuuauugccucauuaugucugaagagucccggucgguucgagcgcauccuuuugagagcugccaauacucauagcucugcgaagccuugcgggcagcaauccauacaccugggaggcguguuugaacuacagccaggcgcaucagucuucgugaacguaaccgaucccagccagguuagucaugggacaggauuuacuucuuucggucuccugaaacuuugaggacuagugcaucacauuuaaaagcaucucagccuaccaugagaauaagagaaagaaaaugaagaucaauagcuuauucaucucuuuuucuuuuucguugguguaaagccaacacccugucuaaaaaacauaaauuucuuuaaucauuuugccucuuuucucugugcuucaauuaauaaaaaauggaaagaaccuagaucuaaaaaaaaaaaaaaaaaaaaaaaaaaaaaaaaaaaaaaaaaaaaaaaaaaaaaaaaaaaaaaaaugcaucccccccccccccccccccccccccccccccaaaggcucuuuucagagccaccagaauu

SEQ ID NO: 320 - RNA, 1249 nt, Artificial Sequence
  PDCD1 mRNA product TOP UTR opt3v
ggggcgcugccuacggagguggcagccaucuccuucucggcaucaagcuuaccaugcagaucccucaggcuccuuggccuguugugugggcuguucugcaacuuggauggcggccuggcugguuccuggacucuccugacagacccuggaauccuccaacauucagccccgcucugcuggugguuaccgagggcgauaaugccaccuucaccuguagcuucagcaacaccagcgagagcuucgugcugaacugguacagaaugagccccagcaaccagaccgacaagcuggccgccuuuccugaggauagaucucagcccggccaggacugccgguucagaguuacacagcugcccaacggccgggacuuccacaugucugucguccgggccagaagaaacgacagcggcacauaucugugcggcgccauuucucuggccccuaaggcucagaucaaagagagccugagagccgagcugagagugacagaaagacgggccgaagugcccacagcucacccuucaccuucuccaagaccugccggccaguuccagacacuggucgugggaguuguuggcggacugcugggaucucuggugcugcuuguuugggugcucgccgugaucuguagcagagccgccagaggaacaaucggcgccagaaggacaggccagccucugaaagaggaucccucugcuguccccguguucagcguggacuauggcgagcuggauuuccaguggcgggaaaagacacccgagccuccagugccuugugugccugagcagacagaguacgccaccaucguguucccuagcggcaugggcacaucuagcccugccagaagaggaucugccgacggaccuagaucugcccagccucucagaccugaggauggccacuguagcuggccucuguaaggacuagugcaucacauuuaaaagcaucucagccuaccaugagaauaagagaaagaaaaugaagaucaauagcuuauucaucucuuuuucuuuuucguugguguaaagccaacacccugucuaaaaaacauaaauuucuuuaaucauuuugccucuuuucucugugcuucaauuaauaaaaaauggaaagaaccuagaucuaaaaaaaaaaaaaaaaaaaaaaaaaaaaaaaaaaaaaaaaaaaaaaaaaaaaaaaaaaaaaaaaugcaucccccccccccccccccccccccccccccccaaaggcucuuuucagagccaccagaauu

SEQ ID NO: 321 - RNA, 832 nt, Artificial Sequence
  PDCD1(1-149) mRNA product TOP UTR opt3v
ggggcgcugccuacggagguggcagccaucuccuucucggcaucaagcuuaccaugcagaucccucaggcuccuuggccuguugugugggcuguucugcaacuuggauggcggccuggcugguuccuggacucuccugacagacccuggaauccuccaacauucagccccgcucugcuggugguuaccgagggcgauaaugccaccuucaccuguagcuucagcaacaccagcgagagcuucgugcugaacugguacagaaugagccccagcaaccagaccgacaagcuggccgccuuuccugaggauagaucucagcccggccaggacugccgguucagaguuacacagcugcccaacggccgggacuuccacaugucugucguccgggccagaagaaacgacagcggcacauaucugugcggcgccauuucucuggccccuaaggcucagaucaaagagagccugagagccgagcugagagugacagaaagacgggccugaggacuagugcaucacauuuaaaagcaucucagccuaccaugagaauaagagaaagaaaaugaagaucaauagcuuauucaucucuuuuucuuuuucguugguguaaagccaacacccugucuaaaaaacauaaauuucuuuaaucauuuugccucuuuucucugugcuucaauuaauaaaaaauggaaagaaccuagaucuaaaaaaaaaaaaaaaaaaaaaaaaaaaaaaaaaaaaaaaaaaaaaaaaaaaaaaaaaaaaaaaaugcaucccccccccccccccccccccccccccccccaaaggcucuuuucagagccaccagaauu

SEQ ID NO: 322 - RNA, 1042 nt, Artificial Sequence
  IL12A mRNA product TOP UTR opt3v
ggggcgcugccuacggagguggcagccaucuccuucucggcaucaagcuuaccaugugcccugccagaucucugcugcugguggcuacacuggugcugcuggaucaucugagccuggccagaaaccugccaguggccacgccugauccuggcauguuuccuugucugcaccacagccagaaccugcugagagccguguccaacaugcugcagaaggccagacagacccucgaguucuaccccugcaccagcgaggaaaucgaccacgaggacaucaccaaggacaagaccagcaccguggaagccugccugccucuggaacugaccaagaacgagagcugccugaacagccgggaaaccagcuucaucaccaacggcucuugccuggccuccagaaagaccuccuucaugauggcccugugccugagcagcaucuacgaggaccugaagauguaccaggucgaguucaagaccaugaacgccaagcugcugauggaccccaagcggcagaucuuccuggaccagaauaugcuggccgugaucgacgagcugaugcaggcccugaacuucaacagcgagacagugccccagaaguccagccuggaagaacccgacuucuacaagaccaagaucaagcugugcauccugcugcacgccuuccggaucagagccgugaccaucgacagagugaugagcuaccugaacgccuccugaggacuagugcaucacauuuaaaagcaucucagccuaccaugagaauaagagaaagaaaaugaagaucaauagcuuauucaucucuuuuucuuuuucguugguguaaagccaacacccugucuaaaaaacauaaauuucuuuaaucauuuugccucuuuucucugugcuucaauuaauaaaaaauggaaagaaccuagaucuaaaaaaaaaaaaaaaaaaaaaaaaaaaaaaaaaaaaaaaaaaaaaaaaaaaaaaaaaaaaaaaaugcaucccccccccccccccccccccccccccccccaaaggcucuuuucagagccaccagaauu

SEQ ID NO: 323 - RNA, 1039 nt, Artificial Sequence
  IL12A(1-219) mRNA product TOP UTR opt3v
ggggcgcugccuacggagguggcagccaucuccuucucggcaucaagcuuaccaugugcccugccagaucucugcugcugguggcuacacuggugcugcuggaucaucugagccuggccagaaaccugccaguggccacgccugauccuggcauguuuccuugucugcaccacagccagaaccugcugagagccguguccaacaugcugcagaaggccagacagacccucgaguucuaccccugcaccagcgaggaaaucgaccacgaggacaucaccaaggacaagaccagcaccguggaagccugccugccucuggaacugaccaagaacgagagcugccugaacagccgggaaaccagcuucaucaccaacggcucuugccuggccuccagaaagaccuccuucaugauggcccugugccugagcagcaucuacgaggaccugaagauguaccaggucgaguucaagaccaugaacgccaagcugcugauggaccccaagcggcagaucuuccuggaccagaauaugcuggccgugaucgacgagcugaugcaggcccugaacuucaacagcgagacagugccccagaaguccagccuggaagaacccgacuucuacaagaccaagaucaagcugugcauccugcugcacgccuuccggaucagagccgugaccaucgacagagugaugagcuaccugaacgccuccggacuagugcaucacauuuaaaagcaucucagccuaccaugagaauaagagaaagaaaaugaagaucaauagcuuauucaucucuuuuucuuuuucguugguguaaagccaacacccugucuaaaaaacauaaauuucuuuaaucauuuugccucuuuucucugugcuucaauuaauaaaaaauggaaagaaccuagaucuaaaaaaaaaaaaaaaaaaaaaaaaaaaaaaaaaaaaaaaaaaaaaaaaaaaaaaaaaaaaaaaaugcaucccccccccccccccccccccccccccccccaaaggcucuuuucagagccaccagaauu

SEQ ID NO: 324 - RNA, 976 nt, Artificial Sequence
  IL12A(23-219) mRNA product TOP UTR opt3v
ggggcgcugccuacggagguggcagccaucuccuucucggcaucaagcuuaccagaaaccugccaguggccacgccugauccuggcauguuuccuugucugcaccacagccagaaccugcugagagccguguccaacaugcugcagaaggccagacagacccucgaguucuaccccugcaccagcgaggaaaucgaccacgaggacaucaccaaggacaagaccagcaccguggaagccugccugccucuggaacugaccaagaacgagagcugccugaacagccgggaaaccagcuucaucaccaacggcucuugccuggccuccagaaagaccuccuucaugauggcccugugccugagcagcaucuacgaggaccugaagauguaccaggucgaguucaagaccaugaacgccaagcugcugauggaccccaagcggcagaucuuccuggaccagaauaugcuggccgugaucgacgagcugaugcaggcccugaacuucaacagcgagacagugccccagaaguccagccuggaagaacccgacuucuacaagaccaagaucaagcugugcauccugcugcacgccuuccggaucagagccgugaccaucgacagagugaugagcuaccugaacgccuccugaggacuagugcaucacauuuaaaagcaucucagccuaccaugagaauaagagaaagaaaaugaagaucaauagcuuauucaucucuuuuucuuuuucguugguguaaagccaacacccugucuaaaaaacauaaauuucuuuaaucauuuugccucuuuucucugugcuucaauuaauaaaaaauggaaagaaccuagaucuaaaaaaaaaaaaaaaaaaaaaaaaaaaaaaaaaaaaaaaaaaaaaaaaaaaaaaaaaaaaaaaaugcaucccccccccccccccccccccccccccccccaaaggcucuuuucagagccaccagaauu

SEQ ID NO: 325 - RNA, 1369 nt, Artificial Sequence
  IL12B mRNA product TOP UTR opt3v
ggggcgcugccuacggagguggcagccaucuccuucucggcaucaagcuuaccaugugucaccagcagcuggucaucagcugguucagccugguguuccuggccucuccucugguggccaucugggagcugaagaaagacguguacgugguggaacuggacugguaucccgaugcuccuggcgagaugguggugcugaccugcgauaccccugaagaggacggcaucaccuggacacuggaucagucuagcgaggugcucggcagcggcaagacccugaccauccaagugaaagaguuuggcgacgccggccaguacaccugucacaaaggcggagaagugcugagccacagccugcugcugcuccacaagaaagaggauggcauuuggagcaccgacauccugaaggaccagaaagagcccaagaacaagaccuuccugagaugcgaggccaagaacuacagcggccgguucacauguugguggcugaccaccaucagcaccgaccugaccuucagcgugaaguccagcagaggcagcagugauccucagggcguuacauguggcgccgcuacacugucugccgaaagagugcggggcgacaacaaagaauacgaguacagcguggaaugccaagaggacagcgccuguccagccgccgaagagucucugccuaucgaagugaugguggacgccgugcacaagcugaaguacgagaacuacaccuccagcuuuuucauccgggacaucaucaagcccgauccuccaaagaaccugcagcugaagccucugaagaacagcagacagguggaaguguccugggaguaccccgacaccuggucuacaccccacagcuacuucagccugaccuuuugcgugcaagugcagggcaaguccaagcgcgagaaaaaggaccggguguucaccgacaagaccagcgccaccgugaucugcagaaagaacgccagcaucagcgucagagcccaggaccgguacuacagcagcucuuggagcgaaugggccagcgugccauguagcuaaggacuagugcaucacauuuaaaagcaucucagccuaccaugagaauaagagaaagaaaaugaagaucaauagcuuauucaucucuuuuucuuuuucguugguguaaagccaacacccugucuaaaaaacauaaauuucuuuaaucauuuugccucuuuucucugugcuucaauuaauaaaaaauggaaagaaccuagaucuaaaaaaaaaaaaaaaaaaaaaaaaaaaaaaaaaaaaaaaaaaaaaaaaaaaaaaaaaaaaaaaaugcaucccccccccccccccccccccccccccccccaaaggcucuuuucagagccaccagaauu

SEQ ID NO: 326 - RNA, 1366 nt, Artificial Sequence
  IL12B(1-328) mRNA product TOP UTR opt3v
ggggcgcugccuacggagguggcagccaucuccuucucggcaucaagcuuaccaugugucaccagcagcuggucaucagcugguucagccugguguuccuggccucuccucugguggccaucugggagcugaagaaagacguguacgugguggaacuggacugguaucccgaugcuccuggcgagaugguggugcugaccugcgauaccccugaagaggacggcaucaccuggacacuggaucagucuagcgaggugcucggcagcggcaagacccugaccauccaagugaaagaguuuggcgacgccggccaguacaccugucacaaaggcggagaagugcugagccacagccugcugcugcuccacaagaaagaggauggcauuuggagcaccgacauccugaaggaccagaaagagcccaagaacaagaccuuccugagaugcgaggccaagaacuacagcggccgguucacauguugguggcugaccaccaucagcaccgaccugaccuucagcgugaaguccagcagaggcagcagugauccucagggcguuacauguggcgccgcuacacugucugccgaaagagugcggggcgacaacaaagaauacgaguacagcguggaaugccaagaggacagcgccuguccagccgccgaagagucucugccuaucgaagugaugguggacgccgugcacaagcugaaguacgagaacuacaccuccagcuuuuucauccgggacaucaucaagcccgauccuccaaagaaccugcagcugaagccucugaagaacagcagacagguggaaguguccugggaguaccccgacaccuggucuacaccccacagcuacuucagccugaccuuuugcgugcaagugcagggcaaguccaagcgcgagaaaaaggaccggguguucaccgacaagaccagcgccaccgugaucugcagaaagaacgccagcaucagcgucagagcccaggaccgguacuacagcagcucuuggagcgaaugggccagcgugccauguagcggacuagugcaucacauuuaaaagcaucucagccuaccaugagaauaagagaaagaaaaugaagaucaauagcuuauucaucucuuuuucuuuuucguugguguaaagccaacacccugucuaaaaaacauaaauuucuuuaaucauuuugccucuuuucucugugcuucaauuaauaaaaaauggaaagaaccuagaucuaaaaaaaaaaaaaaaaaaaaaaaaaaaaaaaaaaaaaaaaaaaaaaaaaaaaaaaaaaaaaaaaugcaucccccccccccccccccccccccccccccccaaaggcucuuuucagagccaccagaauu

SEQ ID NO: 327 - RNA, 1303 nt, Artificial Sequence
  IL12B(23-328) mRNA product TOP UTR opt3v
ggggcgcugccuacggagguggcagccaucuccuucucggcaucaagcuuaccaucugggagcugaagaaagacguguacgugguggaacuggacugguaucccgaugcuccuggcgagaugguggugcugaccugcgauaccccugaagaggacggcaucaccuggacacuggaucagucuagcgaggugcucggcagcggcaagacccugaccauccaagugaaagaguuuggcgacgccggccaguacaccugucacaaaggcggagaagugcugagccacagccugcugcugcuccacaagaaagaggauggcauuuggagcaccgacauccugaaggaccagaaagagcccaagaacaagaccuuccugagaugcgaggccaagaacuacagcggccgguucacauguugguggcugaccaccaucagcaccgaccugaccuucagcgugaaguccagcagaggcagcagugauccucagggcguuacauguggcgccgcuacacugucugccgaaagagugcggggcgacaacaaagaauacgaguacagcguggaaugccaagaggacagcgccuguccagccgccgaagagucucugccuaucgaagugaugguggacgccgugcacaagcugaaguacgagaacuacaccuccagcuuuuucauccgggacaucaucaagcccgauccuccaaagaaccugcagcugaagccucugaagaacagcagacagguggaaguguccugggaguaccccgacaccuggucuacaccccacagcuacuucagccugaccuuuugcgugcaagugcagggcaaguccaagcgcgagaaaaaggaccggguguucaccgacaagaccagcgccaccgugaucugcagaaagaacgccagcaucagcgucagagcccaggaccgguacuacagcagcucuuggagcgaaugggccagcgugccauguagcuaaggacuagugcaucacauuuaaaagcaucucagccuaccaugagaauaagagaaagaaaaugaagaucaauagcuuauucaucucuuuuucuuuuucguugguguaaagccaacacccugucuaaaaaacauaaauuucuuuaaucauuuugccucuuuucucugugcuucaauuaauaaaaaauggaaagaaccuagaucuaaaaaaaaaaaaaaaaaaaaaaaaaaaaaaaaaaaaaaaaaaaaaaaaaaaaaaaaaaaaaaaaugcaucccccccccccccccccccccccccccccccaaaggcucuuuucagagccaccagaauu

SEQ ID NO: 328 - RNA, 436 nt, Artificial Sequence
  Linker-sFvCC49-218 mRNA product TOP UTR opt3v
ggggcgcugccuacggagguggcagccaucuccuucucggcaucaagcuuaccggcucuacaucuggcucuggcaaaccuggaucuggcgagggcucuacaaagggcggacuagugcaucacauuuaaaagcaucucagccuaccaugagaauaagagaaagaaaaugaagaucaauagcuuauucaucucuuuuucuuuuucguugguguaaagccaacacccugucuaaaaaacauaaauuucuuuaaucauuuugccucuuuucucugugcuucaauuaauaaaaaauggaaagaaccuagaucuaaaaaaaaaaaaaaaaaaaaaaaaaaaaaaaaaaaaaaaaaaaaaaaaaaaaaaaaaaaaaaaaugcaucccccccccccccccccccccccccccccccaaaggcucuuuucagagccaccagaauu

SEQ ID NO: 329 - RNA, 2014 nt, Artificial Sequence
  IL12 mRNA product TOP UTR opt3v
ggggcgcugccuacggagguggcagccaucuccuucucggcaucaagcuuaccaugugucaccagcagcuggucaucagcugguucagccugguguuccuggccucuccucugguggccaucugggagcugaagaaagacguguacgugguggaacuggacugguaucccgaugcuccuggcgagaugguggugcugaccugcgauaccccugaagaggacggcaucaccuggacacuggaucagucuagcgaggugcucggcagcggcaagacccugaccauccaagugaaagaguuuggcgacgccggccaguacaccugucacaaaggcggagaagugcugagccacagccugcugcugcuccacaagaaagaggauggcauuuggagcaccgacauccugaaggaccagaaagagcccaagaacaagaccuuccugagaugcgaggccaagaacuacagcggccgguucacauguugguggcugaccaccaucagcaccgaccugaccuucagcgugaaguccagcagaggcagcagugauccucagggcguuacauguggcgccgcuacacugucugccgaaagagugcggggcgacaacaaagaauacgaguacagcguggaaugccaagaggacagcgccuguccagccgccgaagagucucugccuaucgaagugaugguggacgccgugcacaagcugaaguacgagaacuacaccuccagcuuuuucauccgggacaucaucaagcccgauccuccaaagaaccugcagcugaagccucugaagaacagcagacagguggaaguguccugggaguaccccgacaccuggucuacaccccacagcuacuucagccugaccuuuugcgugcaagugcagggcaaguccaagcgcgagaaaaaggaccggguguucaccgacaagaccagcgccaccgugaucugcagaaagaacgccagcaucagcgucagagcccaggaccgguacuacagcagcucuuggagcgaaugggccagcgugccauguagcggcucuacaucuggcucuggcaaaccuggaucuggcgagggcucuacaaagggcagaaaccugccaguggccacgccugauccuggcauguuuccuugucugcaccacagccagaaccugcugagagccguguccaacaugcugcagaaggccagacagacccucgaguucuaccccugcaccagcgaggaaaucgaccacgaggacaucaccaaggacaagaccagcaccguggaagccugccugccucuggaacugaccaagaacgagagcugccugaacagccgggaaaccagcuucaucaccaacggcucuugccuggccuccagaaagaccuccuucaugauggcccugugccugagcagcaucuacgaggaccugaagauguaccaggucgaguucaagaccaugaacgccaagcugcugauggaccccaagcggcagaucuuccuggaccagaauaugcuggccgugaucgacgagcugaugcaggcccugaacuucaacagcgagacagugccccagaaguccagccuggaagaacccgacuucuacaagaccaagaucaagcugugcauccugcugcacgccuuccggaucagagccgugaccaucgacagagugaugagcuaccugaacgccuccugaggacuagugcaucacauuuaaaagcaucucagccuaccaugagaauaagagaaagaaaaugaagaucaauagcuuauucaucucuuuuucuuuuucguugguguaaagccaacacccugucuaaaaaacauaaauuucuuuaaucauuuugccucuuuucucugugcuucaauuaauaaaaaauggaaagaaccuagaucuaaaaaaaaaaaaaaaaaaaaaaaaaaaaaaaaaaaaaaaaaaaaaaaaaaaaaaaaaaaaaaaaugcaucccccccccccccccccccccccccccccccaaaggcucuuuucagagccaccagaauu

SEQ ID NO: 330 - RNA, 1168 nt, Artificial Sequence
  CD40LG mRNA product TOP UTR opt3v
ggggcgcugccuacggagguggcagccaucuccuucucggcaucaagcuuaccaugaucgagacauacaaccagacaagccccagaagcgccgccacaggacugccuaucagcaugaagaucuuuauguaccugcugaccguguuccugaucacccagaugaucggcagcgcccuguuugccguguaccugcacagacggcuggacaagaucgaggacgagagaaaccugcacgaggacuucguguucaugaagaccauccagcggugcaacaccggcgagagaagucugagccugcugaacugcgaggaaaucaagagccaguucgagggcuucgugaaggacaucaugcugaacaaagaggaaacgaagaaagaaaacuccuucgagaugcagaagggcgaccagaauccucagaucgccgcucacgugaucagcgaggccagcagcaagacaacaagcgugcugcagugggccgagaagggcuacuacaccaugagcaacaaccuggucacccuggaaaacggcaagcagcugacagugaagcggcagggccuguacuacaucuacgcccaagugaccuucugcagcaacagagaggccagcucucaggccccuuuuaucgccagccugugccugaaguccccuggcagauucgagcggauucugcugagagccgccaacacacacagcagcgccaaaccuuguggccagcagucuauucaccucggcggaguguuugagcugcagccuggcgcaagcguguucgugaaugugacagacccuagccaggugucccacggcaccggcuuuacaucuuucggacugcugaagcugugaggacuagugcaucacauuuaaaagcaucucagccuaccaugagaauaagagaaagaaaaugaagaucaauagcuuauucaucucuuuuucuuuuucguugguguaaagccaacacccugucuaaaaaacauaaauuucuuuaaucauuuugccucuuuucucugugcuucaauuaauaaaaaauggaaagaaccuagaucuaaaaaaaaaaaaaaaaaaaaaaaaaaaaaaaaaaaaaaaaaaaaaaaaaaaaaaaaaaaaaaaaugcaucccccccccccccccccccccccccccccccaaaggcucuuuucagagccaccagaauu

SEQ ID NO: 331 - RNA, 1249 nt, Artificial Sequence
  PDCD1 mRNA product TOP UTR opt4
ggggcgcugccuacggagguggcagccaucuccuucucggcaucaagcuuaccaugcagaucccccaggcccccuggcccguggugugggccgugcugcagcugggcuggagacccggcugguuccuggacagccccgacagacccuggaacccccccaccuucagccccgcccugcugguggugaccgagggcgacaacgccaccuucaccuguagcuucagcaacaccagcgagagcuucgugcugaacugguacagaaugagccccagcaaccagaccgacaagcuggccgccuuccccgaggacagaagccagcccggccaggacugcagauucagagugacccagcugcccaacggcagagacuuccacaugagcguggugagagccagaagaaacgacagcggcaccuaccugugcggcgccaucagccuggcccccaaggcccagaucaaggagagccugagagccgagcugagagugaccgagagaagggccgaggugcccaccgcccaccccagccccagccccagacccgccggccaguuccagacccugguggugggcguggugggcggccugcugggcagccuggugcugcuggugugggugcuggccgugaucugcagcagagccgccagaggcaccaucggcgccagaagaaccggccagccccugaaggaggaccccagcgccgugcccguguucagcguggacuacggcgagcuggacuuccaguggagagagaagacccccgagccccccgugcccugcgugcccgagcagaccgaguacgccaccaucguguuccccagcggcaugggcaccagcagccccgccagaagaggcagcgccgacggccccagaagcgcccagccccugagacccgaggacggccacugcagcuggccccugugaggacuagugcaucacauuuaaaagcaucucagccuaccaugagaauaagagaaagaaaaugaagaucaauagcuuauucaucucuuuuucuuuuucguugguguaaagccaacacccugucuaaaaaacauaaauuucuuuaaucauuuugccucuuuucucugugcuucaauuaauaaaaaauggaaagaaccuagaucuaaaaaaaaaaaaaaaaaaaaaaaaaaaaaaaaaaaaaaaaaaaaaaaaaaaaaaaaaaaaaaaaugcaucccccccccccccccccccccccccccccccaaaggcucuuuucagagccaccagaauu

SEQ ID NO: 332 - RNA, 832 nt, Artificial Sequence
  PDCD1(1-149) mRNA product TOP UTR opt4
ggggcgcugccuacggagguggcagccaucuccuucucggcaucaagcuuaccaugcagaucccccaggcccccuggcccguggugugggccgugcugcagcugggcuggagacccggcugguuccuggacagccccgacagacccuggaacccccccaccuucagccccgcccugcugguggugaccgagggcgacaacgccaccuucaccuguagcuucagcaacaccagcgagagcuucgugcugaacugguacagaaugagccccagcaaccagaccgacaagcuggccgccuuccccgaggacagaagccagcccggccaggacugcagauucagagugacccagcugcccaacggcagagacuuccacaugagcguggugagagccagaagaaacgacagcggcaccuaccugugcggcgccaucagccuggcccccaaggcccagaucaaggagagccugagagccgagcugagagugaccgagagaagggccugaggacuagugcaucacauuuaaaagcaucucagccuaccaugagaauaagagaaagaaaaugaagaucaauagcuuauucaucucuuuuucuuuuucguugguguaaagccaacacccugucuaaaaaacauaaauuucuuuaaucauuuugccucuuuucucugugcuucaauuaauaaaaaauggaaagaaccuagaucuaaaaaaaaaaaaaaaaaaaaaaaaaaaaaaaaaaaaaaaaaaaaaaaaaaaaaaaaaaaaaaaaugcaucccccccccccccccccccccccccccccccaaaggcucuuuucagagccaccagaauu

SEQ ID NO: 333 - RNA, 1042 nt, Artificial Sequence
  IL12A mRNA product TOP UTR opt4
ggggcgcugccuacggagguggcagccaucuccuucucggcaucaagcuuaccaugugccccgccagaagccugcugcugguggccacccuggugcugcuggaccaccugagccuggccagaaaccugcccguggccacccccgaccccggcauguuccccugccugcaccacagccagaaccugcugagagccgugagcaacaugcugcagaaggccagacagacccuggaguucuaccccugcaccagcgaggagaucgaccacgaggacaucaccaaggacaagaccagcaccguggaggccugccugccccuggagcugaccaagaacgagagcugccugaacagcagagagaccagcuucaucaccaacggcagcugccuggccagcagaaagaccagcuucaugauggcccugugccugagcagcaucuacgaggaccugaagauguaccagguggaguucaagaccaugaacgccaagcugcugauggaccccaagagacagaucuuccuggaccagaacaugcuggccgugaucgacgagcugaugcaggcccugaacuucaacagcgagaccgugccccagaagaguagccuggaggagcccgacuucuacaagaccaagaucaagcugugcauccugcugcacgccuucagaaucagagccgugaccaucgacagagugaugagcuaccugaacgccagcugaggacuagugcaucacauuuaaaagcaucucagccuaccaugagaauaagagaaagaaaaugaagaucaauagcuuauucaucucuuuuucuuuuucguugguguaaagccaacacccugucuaaaaaacauaaauuucuuuaaucauuuugccucuuuucucugugcuucaauuaauaaaaaauggaaagaaccuagaucuaaaaaaaaaaaaaaaaaaaaaaaaaaaaaaaaaaaaaaaaaaaaaaaaaaaaaaaaaaaaaaaaugcaucccccccccccccccccccccccccccccccaaaggcucuuuucagagccaccagaauu

SEQ ID NO: 334 - RNA, 1039 nt, Artificial Sequence
  IL12A(1-219) mRNA product TOP UTR opt4
ggggcgcugccuacggagguggcagccaucuccuucucggcaucaagcuuaccaugugccccgccagaagccugcugcugguggccacccuggugcugcuggaccaccugagccuggccagaaaccugcccguggccacccccgaccccggcauguuccccugccugcaccacagccagaaccugcugagagccgugagcaacaugcugcagaaggccagacagacccuggaguucuaccccugcaccagcgaggagaucgaccacgaggacaucaccaaggacaagaccagcaccguggaggccugccugccccuggagcugaccaagaacgagagcugccugaacagcagagagaccagcuucaucaccaacggcagcugccuggccagcagaaagaccagcuucaugauggcccugugccugagcagcaucuacgaggaccugaagauguaccagguggaguucaagaccaugaacgccaagcugcugauggaccccaagagacagaucuuccuggaccagaacaugcuggccgugaucgacgagcugaugcaggcccugaacuucaacagcgagaccgugccccagaagaguagccuggaggagcccgacuucuacaagaccaagaucaagcugugcauccugcugcacgccuucagaaucagagccgugaccaucgacagagugaugagcuaccugaacgccagcggacuagugcaucacauuuaaaagcaucucagccuaccaugagaauaagagaaagaaaaugaagaucaauagcuuauucaucucuuuuucuuuuucguugguguaaagccaacacccugucuaaaaaacauaaauuucuuuaaucauuuugccucuuuucucugugcuucaauuaauaaaaaauggaaagaaccuagaucuaaaaaaaaaaaaaaaaaaaaaaaaaaaaaaaaaaaaaaaaaaaaaaaaaaaaaaaaaaaaaaaaugcaucccccccccccccccccccccccccccccccaaaggcucuuuucagagccaccagaauu

SEQ ID NO: 335 - RNA, 976 nt, Artificial Sequence
  IL12A(23-219) mRNA product TOP UTR opt4
ggggcgcugccuacggagguggcagccaucuccuucucggcaucaagcuuaccagaaaccugcccguggccacccccgaccccggcauguuccccugccugcaccacagccagaaccugcugagagccgugagcaacaugcugcagaaggccagacagacccuggaguucuaccccugcaccagcgaggagaucgaccacgaggacaucaccaaggacaagaccagcaccguggaggccugccugccccuggagcugaccaagaacgagagcugccugaacagcagagagaccagcuucaucaccaacggcagcugccuggccagcagaaagaccagcuucaugauggcccugugccugagcagcaucuacgaggaccugaagauguaccagguggaguucaagaccaugaacgccaagcugcugauggaccccaagagacagaucuuccuggaccagaacaugcuggccgugaucgacgagcugaugcaggcccugaacuucaacagcgagaccgugccccagaagaguagccuggaggagcccgacuucuacaagaccaagaucaagcugugcauccugcugcacgccuucagaaucagagccgugaccaucgacagagugaugagcuaccugaacgccagcugaggacuagugcaucacauuuaaaagcaucucagccuaccaugagaauaagagaaagaaaaugaagaucaauagcuuauucaucucuuuuucuuuuucguugguguaaagccaacacccugucuaaaaaacauaaauuucuuuaaucauuuugccucuuuucucugugcuucaauuaauaaaaaauggaaagaaccuagaucuaaaaaaaaaaaaaaaaaaaaaaaaaaaaaaaaaaaaaaaaaaaaaaaaaaaaaaaaaaaaaaaaugcaucccccccccccccccccccccccccccccccaaaggcucuuuucagagccaccagaauu

SEQ ID NO: 336 - RNA, 1369 nt, Artificial Sequence
  IL12B mRNA product TOP UTR opt4
ggggcgcugccuacggagguggcagccaucuccuucucggcaucaagcuuaccaugugccaccagcagcuggugaucagcugguucagccugguguuccuggccagcccccugguggccaucugggagcugaagaaggacguguacgugguggagcuggacugguaccccgacgcccccggcgagaugguggugcugaccugcgacacccccgaggaggacggcaucaccuggacccuggaccagagcagcgaggugcugggcagcggcaagacccugaccauccaggugaaggaguucggcgacgccggccaguacaccugucacaagggcggcgaggugcugagccacagccugcugcugcugcacaagaaggaggacggcaucuggagcaccgacauccugaaggaccagaaggagcccaagaacaagaccuuccugagaugcgaggccaagaacuacagcggcagauucaccuguugguggcugaccaccaucagcaccgaccugaccuucagcgugaagaguagcagaggcagcagcgacccccagggcgugaccugcggcgccgccacccugagcgccgagagagugagaggcgacaacaaggaguacgaguacagcguggagugccaggaggacagcgccugccccgccgccgaggagagccugcccaucgaggugaugguggacgccgugcacaagcugaaguacgagaacuacaccagcagcuucuucaucagagacaucaucaagcccgacccccccaagaaccugcagcugaagccccugaagaacagcagacagguggaggugagcugggaguaccccgacaccuggagcaccccccacagcuacuucagccugaccuucugcgugcagguucagggcaagagcaagagagagaagaaggacagaguguucaccgacaagaccagcgccaccgugaucugcagaaagaacgccagcaucagcgugagagcccaggacagauacuacagcagcagcuggagcgagugggccagcgugcccugcagcugaggacuagugcaucacauuuaaaagcaucucagccuaccaugagaauaagagaaagaaaaugaagaucaauagcuuauucaucucuuuuucuuuuucguugguguaaagccaacacccugucuaaaaaacauaaauuucuuuaaucauuuugccucuuuucucugugcuucaauuaauaaaaaauggaaagaaccuagaucuaaaaaaaaaaaaaaaaaaaaaaaaaaaaaaaaaaaaaaaaaaaaaaaaaaaaaaaaaaaaaaaaugcaucccccccccccccccccccccccccccccccaaaggcucuuuucagagccaccagaauu

SEQ ID NO: 337 - RNA, 1366 nt, Artificial Sequence
  IL12B(1-328) mRNA product TOP UTR opt4
ggggcgcugccuacggagguggcagccaucuccuucucggcaucaagcuuaccaugugccaccagcagcuggugaucagcugguucagccugguguuccuggccagcccccugguggccaucugggagcugaagaaggacguguacgugguggagcuggacugguaccccgacgcccccggcgagaugguggugcugaccugcgacacccccgaggaggacggcaucaccuggacccuggaccagagcagcgaggugcugggcagcggcaagacccugaccauccaggugaaggaguucggcgacgccggccaguacaccugucacaagggcggcgaggugcugagccacagccugcugcugcugcacaagaaggaggacggcaucuggagcaccgacauccugaaggaccagaaggagcccaagaacaagaccuuccugagaugcgaggccaagaacuacagcggcagauucaccuguugguggcugaccaccaucagcaccgaccugaccuucagcgugaagaguagcagaggcagcagcgacccccagggcgugaccugcggcgccgccacccugagcgccgagagagugagaggcgacaacaaggaguacgaguacagcguggagugccaggaggacagcgccugccccgccgccgaggagagccugcccaucgaggugaugguggacgccgugcacaagcugaaguacgagaacuacaccagcagcuucuucaucagagacaucaucaagcccgacccccccaagaaccugcagcugaagccccugaagaacagcagacagguggaggugagcugggaguaccccgacaccuggagcaccccccacagcuacuucagccugaccuucugcgugcagguucagggcaagagcaagagagagaagaaggacagaguguucaccgacaagaccagcgccaccgugaucugcagaaagaacgccagcaucagcgugagagcccaggacagauacuacagcagcagcuggagcgagugggccagcgugcccugcagcggacuagugcaucacauuuaaaagcaucucagccuaccaugagaauaagagaaagaaaaugaagaucaauagcuuauucaucucuuuuucuuuuucguugguguaaagccaacacccugucuaaaaaacauaaauuucuuuaaucauuuugccucuuuucucugugcuucaauuaauaaaaaauggaaagaaccuagaucuaaaaaaaaaaaaaaaaaaaaaaaaaaaaaaaaaaaaaaaaaaaaaaaaaaaaaaaaaaaaaaaaugcaucccccccccccccccccccccccccccccccaaaggcucuuuucagagccaccagaauu

SEQ ID NO: 338 - RNA, 1303 nt, Artificial Sequence
  IL12B(23-328) mRNA product TOP UTR opt4
ggggcgcugccuacggagguggcagccaucuccuucucggcaucaagcuuaccaucugggagcugaagaaggacguguacgugguggagcuggacugguaccccgacgcccccggcgagaugguggugcugaccugcgacacccccgaggaggacggcaucaccuggacccuggaccagagcagcgaggugcugggcagcggcaagacccugaccauccaggugaaggaguucggcgacgccggccaguacaccugucacaagggcggcgaggugcugagccacagccugcugcugcugcacaagaaggaggacggcaucuggagcaccgacauccugaaggaccagaaggagcccaagaacaagaccuuccugagaugcgaggccaagaacuacagcggcagauucaccuguugguggcugaccaccaucagcaccgaccugaccuucagcgugaagaguagcagaggcagcagcgacccccagggcgugaccugcggcgccgccacccugagcgccgagagagugagaggcgacaacaaggaguacgaguacagcguggagugccaggaggacagcgccugccccgccgccgaggagagccugcccaucgaggugaugguggacgccgugcacaagcugaaguacgagaacuacaccagcagcuucuucaucagagacaucaucaagcccgacccccccaagaaccugcagcugaagccccugaagaacagcagacagguggaggugagcugggaguaccccgacaccuggagcaccccccacagcuacuucagccugaccuucugcgugcagguucagggcaagagcaagagagagaagaaggacagaguguucaccgacaagaccagcgccaccgugaucugcagaaagaacgccagcaucagcgugagagcccaggacagauacuacagcagcagcuggagcgagugggccagcgugcccugcagcugaggacuagugcaucacauuuaaaagcaucucagccuaccaugagaauaagagaaagaaaaugaagaucaauagcuuauucaucucuuuuucuuuuucguugguguaaagccaacacccugucuaaaaaacauaaauuucuuuaaucauuuugccucuuuucucugugcuucaauuaauaaaaaauggaaagaaccuagaucuaaaaaaaaaaaaaaaaaaaaaaaaaaaaaaaaaaaaaaaaaaaaaaaaaaaaaaaaaaaaaaaaugcaucccccccccccccccccccccccccccccccaaaggcucuuuucagagccaccagaauu

SEQ ID NO: 339 - RNA, 436 nt, Artificial Sequence
  Linker-sFvCC49-218 mRNA product TOP UTR opt4
ggggcgcugccuacggagguggcagccaucuccuucucggcaucaagcuuaccggcagcaccagcggcagcggcaagcccggcagcggcgagggcagcaccaagggcggacuagugcaucacauuuaaaagcaucucagccuaccaugagaauaagagaaagaaaaugaagaucaauagcuuauucaucucuuuuucuuuuucguugguguaaagccaacacccugucuaaaaaacauaaauuucuuuaaucauuuugccucuuuucucugugcuucaauuaauaaaaaauggaaagaaccuagaucuaaaaaaaaaaaaaaaaaaaaaaaaaaaaaaaaaaaaaaaaaaaaaaaaaaaaaaaaaaaaaaaaugcaucccccccccccccccccccccccccccccccaaaggcucuuuucagagccaccagaauu

SEQ ID NO: 340 - RNA, 2014 nt, Artificial Sequence
  IL12 mRNA product TOP UTR opt4
ggggcgcugccuacggagguggcagccaucuccuucucggcaucaagcuuaccaugugccaccagcagcuggugaucagcugguucagccugguguuccuggccagcccccugguggccaucugggagcugaagaaggacguguacgugguggagcuggacugguaccccgacgcccccggcgagaugguggugcugaccugcgacacccccgaggaggacggcaucaccuggacccuggaccagagcagcgaggugcugggcagcggcaagacccugaccauccaggugaaggaguucggcgacgccggccaguacaccugucacaagggcggcgaggugcugagccacagccugcugcugcugcacaagaaggaggacggcaucuggagcaccgacauccugaaggaccagaaggagcccaagaacaagaccuuccugagaugcgaggccaagaacuacagcggcagauucaccuguugguggcugaccaccaucagcaccgaccugaccuucagcgugaagaguagcagaggcagcagcgacccccagggcgugaccugcggcgccgccacccugagcgccgagagagugagaggcgacaacaaggaguacgaguacagcguggagugccaggaggacagcgccugccccgccgccgaggagagccugcccaucgaggugaugguggacgccgugcacaagcugaaguacgagaacuacaccagcagcuucuucaucagagacaucaucaagcccgacccccccaagaaccugcagcugaagccccugaagaacagcagacagguggaggugagcugggaguaccccgacaccuggagcaccccccacagcuacuucagccugaccuucugcgugcagguucagggcaagagcaagagagagaagaaggacagaguguucaccgacaagaccagcgccaccgugaucugcagaaagaacgccagcaucagcgugagagcccaggacagauacuacagcagcagcuggagcgagugggccagcgugcccugcagcggcagcaccagcggcagcggcaagcccggcagcggcgagggcagcaccaagggcagaaaccugcccguggccacccccgaccccggcauguuccccugccugcaccacagccagaaccugcugagagccgugagcaacaugcugcagaaggccagacagacccuggaguucuaccccugcaccagcgaggagaucgaccacgaggacaucaccaaggacaagaccagcaccguggaggccugccugccccuggagcugaccaagaacgagagcugccugaacagcagagagaccagcuucaucaccaacggcagcugccuggccagcagaaagaccagcuucaugauggcccugugccugagcagcaucuacgaggaccugaagauguaccagguggaguucaagaccaugaacgccaagcugcugauggaccccaagagacagaucuuccuggaccagaacaugcuggccgugaucgacgagcugaugcaggcccugaacuucaacagcgagaccgugccccagaagaguagccuggaggagcccgacuucuacaagaccaagaucaagcugugcauccugcugcacgccuucagaaucagagccgugaccaucgacagagugaugagcuaccugaacgccagcugaggacuagugcaucacauuuaaaagcaucucagccuaccaugagaauaagagaaagaaaaugaagaucaauagcuuauucaucucuuuuucuuuuucguugguguaaagccaacacccugucuaaaaaacauaaauuucuuuaaucauuuugccucuuuucucugugcuucaauuaauaaaaaauggaaagaaccuagaucuaaaaaaaaaaaaaaaaaaaaaaaaaaaaaaaaaaaaaaaaaaaaaaaaaaaaaaaaaaaaaaaaugcaucccccccccccccccccccccccccccccccaaaggcucuuuucagagccaccagaauu

SEQ ID NO: 341 - RNA, 1168 nt, Artificial Sequence
  CD40LG mRNA product TOP UTR opt4
ggggcgcugccuacggagguggcagccaucuccuucucggcaucaagcuuaccaugaucgagaccuacaaccagaccagccccagaagcgccgccaccggccugcccaucagcaugaagaucuucauguaccugcugaccguguuccugaucacccagaugaucggcagcgcccuguucgccguguaccugcacagaagacuggacaagaucgaggacgagagaaaccugcacgaggacuucguguucaugaagaccauccagagaugcaacaccggcgagagaagccugagccugcugaacugcgaggagaucaagagccaguucgagggcuucgugaaggacaucaugcugaacaaggaggagaccaagaaggagaacagcuucgagaugcagaagggcgaccagaacccccagaucgccgcccacgugaucagcgaggccagcagcaagaccaccagcgugcugcagugggccgagaagggcuacuacaccaugagcaacaaccuggugacccuggagaacggcaagcagcugaccgugaagagacagggccuguacuacaucuacgcccaggugaccuucugcagcaacagagaggccagcagccaggcccccuucaucgccagccugugccugaagagucccggcagauucgagagaauccugcugagagccgccaacacccacagcagcgccaagcccugcggccagcagagcauccaccugggcggcguguucgagcugcagcccggcgccagcguguucgugaacgugaccgaccccagccaggugagccacggcaccggcuucaccagcuucggccugcugaagcugugaggacuagugcaucacauuuaaaagcaucucagccuaccaugagaauaagagaaagaaaaugaagaucaauagcuuauucaucucuuuuucuuuuucguugguguaaagccaacacccugucuaaaaaacauaaauuucuuuaaucauuuugccucuuuucucugugcuucaauuaauaaaaaauggaaagaaccuagaucuaaaaaaaaaaaaaaaaaaaaaaaaaaaaaaaaaaaaaaaaaaaaaaaaaaaaaaaaaaaaaaaaugcaucccccccccccccccccccccccccccccccaaaggcucuuuucagagccaccagaauu

SEQ ID NO: 342 - RNA, 1249 nt, Artificial Sequence
  PDCD1 mRNA product TOP UTR opt5
ggggcgcugccuacggagguggcagccaucuccuucucggcaucaagcuuaccaugcagaucccccaagccccuuggccgguggucugggcuguucugcagcucggcuggagacccgggugguuccuggacagcccugaucggcccuggaacccucccaccuuuuccccugcccuucugguggugacagagggagacaaugcgacguuuaccugcucuuucagcaacacauccgaaucuuucguccucaauugguaccgcaugagcccguccaaccagaccgauaagcuggcugccuuucccgaggacagaucucagccuggccaagauugucgguuccgcgugacacagcuucccaaugggagagacuuucacaugagcguugugcgggcccgcagaaacgauuccggaaccuaucugugcggcgcuauuagccucgccccuaaagcucagaucaaggaaucucugcgggccgagcugcgcgucacagaaagacgggcggaggugcccaccgcccauccguccccuagcccccgcccugcugggcaguuccaaacgcucguugugggagucgugggcggccugcuugggucucuggugcuccuggucuggguucuugccgugauuuguuccagagcugcccggggaaccaucggcgcgcgcagaacagggcagccccugaaagaggaccccagcgccgugccugucuuuucuguggauuacggagaacucgacuuccaguggcgggagaagaccccggaacccccuguucccugcgugccugagcagacagaguaugcuaccauugucuuucccuccggcauggggacgagcuccccggccagacgcggaucugcugauggcccucggagcgcccaaccccugagaccugaagacggccacuguuccuggccccugugaggacuagugcaucacauuuaaaagcaucucagccuaccaugagaauaagagaaagaaaaugaagaucaauagcuuauucaucucuuuuucuuuuucguugguguaaagccaacacccugucuaaaaaacauaaauuucuuuaaucauuuugccucuuuucucugugcuucaauuaauaaaaaauggaaagaaccuagaucuaaaaaaaaaaaaaaaaaaaaaaaaaaaaaaaaaaaaaaaaaaaaaaaaaaaaaaaaaaaaaaaaugcaucccccccccccccccccccccccccccccccaaaggcucuuuucagagccaccagaauu

SEQ ID NO: 343 - RNA, 832 nt, Artificial Sequence
  PDCD1(1-149) mRNA product TOP UTR opt5
ggggcgcugccuacggagguggcagccaucuccuucucggcaucaagcuuaccaugcagaucccccaagccccuuggccgguggucugggcuguucugcagcucggcuggagacccgggugguuccuggacagcccugaucggcccuggaacccucccaccuuuuccccugcccuucugguggugacagagggagacaaugcgacguuuaccugcucuuucagcaacacauccgaaucuuucguccucaauugguaccgcaugagcccguccaaccagaccgauaagcuggcugccuuucccgaggacagaucucagccuggccaagauugucgguuccgcgugacacagcuucccaaugggagagacuuucacaugagcguugugcgggcccgcagaaacgauuccggaaccuaucugugcggcgcuauuagccucgccccuaaagcucagaucaaggaaucucugcgggccgagcugcgcgucacagaaagacgggcgugaggacuagugcaucacauuuaaaagcaucucagccuaccaugagaauaagagaaagaaaaugaagaucaauagcuuauucaucucuuuuucuuuuucguugguguaaagccaacacccugucuaaaaaacauaaauuucuuuaaucauuuugccucuuuucucugugcuucaauuaauaaaaaauggaaagaaccuagaucuaaaaaaaaaaaaaaaaaaaaaaaaaaaaaaaaaaaaaaaaaaaaaaaaaaaaaaaaaaaaaaaaugcaucccccccccccccccccccccccccccccccaaaggcucuuuucagagccaccagaauu

SEQ ID NO: 344 - RNA, 1042 nt, Artificial Sequence
  IL12A mRNA product TOP UTR opt5
ggggcgcugccuacggagguggcagccaucuccuucucggcaucaagcuuaccaugugccccgccagaagccugcuccugguggcuacccuuguccugcucgaccaccugucccuugcccggaaccugccuguugcgacaccggaucccggcauguucccuugucuccaucacucucagaaucugcugcgcgcugugagcaacaugcuccaaaaggccagacagacgcuggaguuuuaccccugcaccuccgaagagaucgaccaugaagauauuacaaaagacaagaccucuacaguggaggccugucuuccucuggaacucaccaaaaaugagagcugccugaacucccgggagacaucuuucaucaccaaugggagcugucuugcuucccgcaagacgagcuuuaugauggcccugugccucucuuccauuuaugaagaucugaaaauguaccaggucgaguucaagaccaugaacgcuaagcugcucauggaccccaaaagacagaucuuucuggaucaaaauaugcuugccgugauugacgaacugaugcaggcgcucaacuucaauagcgagacaguuccucagaagucuucccuggaggaaccggauuuuuauaaaaccaagaucaaacuuuguauccugcuccacgccuuccggauucgcgcugugacaaucgacagagucaugagcuaccugaacgccucuugaggacuagugcaucacauuuaaaagcaucucagccuaccaugagaauaagagaaagaaaaugaagaucaauagcuuauucaucucuuuuucuuuuucguugguguaaagccaacacccugucuaaaaaacauaaauuucuuuaaucauuuugccucuuuucucugugcuucaauuaauaaaaaauggaaagaaccuagaucuaaaaaaaaaaaaaaaaaaaaaaaaaaaaaaaaaaaaaaaaaaaaaaaaaaaaaaaaaaaaaaaaugcaucccccccccccccccccccccccccccccccaaaggcucuuuucagagccaccagaauu

SEQ ID NO: 345 - RNA, 1039 nt, Artificial Sequence
  IL12A(1-219) mRNA product TOP UTR opt5
ggggcgcugccuacggagguggcagccaucuccuucucggcaucaagcuuaccaugugccccgccagaagccugcuccugguggcuacccuuguccugcucgaccaccugucccuugcccggaaccugccuguugcgacaccggaucccggcauguucccuugucuccaucacucucagaaucugcugcgcgcugugagcaacaugcuccaaaaggccagacagacgcuggaguuuuaccccugcaccuccgaagagaucgaccaugaagauauuacaaaagacaagaccucuacaguggaggccugucuuccucuggaacucaccaaaaaugagagcugccugaacucccgggagacaucuuucaucaccaaugggagcugucuugcuucccgcaagacgagcuuuaugauggcccugugccucucuuccauuuaugaagaucugaaaauguaccaggucgaguucaagaccaugaacgcuaagcugcucauggaccccaaaagacagaucuuucuggaucaaaauaugcuugccgugauugacgaacugaugcaggcgcucaacuucaauagcgagacaguuccucagaagucuucccuggaggaaccggauuuuuauaaaaccaagaucaaacuuuguauccugcuccacgccuuccggauucgcgcugugacaaucgacagagucaugagcuaccugaacgccucuggacuagugcaucacauuuaaaagcaucucagccuaccaugagaauaagagaaagaaaaugaagaucaauagcuuauucaucucuuuuucuuuuucguugguguaaagccaacacccugucuaaaaaacauaaauuucuuuaaucauuuugccucuuuucucugugcuucaauuaauaaaaaauggaaagaaccuagaucuaaaaaaaaaaaaaaaaaaaaaaaaaaaaaaaaaaaaaaaaaaaaaaaaaaaaaaaaaaaaaaaaugcaucccccccccccccccccccccccccccccccaaaggcucuuuucagagccaccagaauu

SEQ ID NO: 346 - RNA, 976 nt, Artificial Sequence
  IL12A(23-219) mRNA product TOP UTR opt5
ggggcgcugccuacggagguggcagccaucuccuucucggcaucaagcuuacccggaaccugccuguugcgacaccggaucccggcauguucccuugucuccaucacucucagaaucugcugcgcgcugugagcaacaugcuccaaaaggccagacagacgcuggaguuuuaccccugcaccuccgaagagaucgaccaugaagauauuacaaaagacaagaccucuacaguggaggccugucuuccucuggaacucaccaaaaaugagagcugccugaacucccgggagacaucuuucaucaccaaugggagcugucuugcuucccgcaagacgagcuuuaugauggcccugugccucucuuccauuuaugaagaucugaaaauguaccaggucgaguucaagaccaugaacgcuaagcugcucauggaccccaaaagacagaucuuucuggaucaaaauaugcuugccgugauugacgaacugaugcaggcgcucaacuucaauagcgagacaguuccucagaagucuucccuggaggaaccggauuuuuauaaaaccaagaucaaacuuuguauccugcuccacgccuuccggauucgcgcugugacaaucgacagagucaugagcuaccugaacgccucuugaggacuagugcaucacauuuaaaagcaucucagccuaccaugagaauaagagaaagaaaaugaagaucaauagcuuauucaucucuuuuucuuuuucguugguguaaagccaacacccugucuaaaaaacauaaauuucuuuaaucauuuugccucuuuucucugugcuucaauuaauaaaaaauggaaagaaccuagaucuaaaaaaaaaaaaaaaaaaaaaaaaaaaaaaaaaaaaaaaaaaaaaaaaaaaaaaaaaaaaaaaaugcaucccccccccccccccccccccccccccccccaaaggcucuuuucagagccaccagaauu

SEQ ID NO: 347 - RNA, 1369 nt, Artificial Sequence
  IL12B mRNA product TOP UTR opt5
ggggcgcugccuacggagguggcagccaucuccuucucggcaucaagcuuaccaugugccaccagcaacuggugaucagcugguucucccucgucuuucuggccucuccccuuguugcuauuugggagcugaagaaagacguguacguggucgaacucgauugguauccugacgccccgggcgagauggugguucugaccugugauacacccgaagaggacgggaucacguggacccuugaucagagcuccgaagugcugggaucuggcaagacacucaccauucaggucaaagaguucggggacgcgggacaguacacaugccauaagggcggggaggugcugagccacucccugcuccugcuucauaaaaaggaagauggaaucuggucuaccgacauucugaaggaucaaaaagagccuaagaacaaaacauuucucagaugugaagcuaagaauuauagcggccgguuuaccugcugguggcugacgaccaucuccacagaccuuaccuucagcguuaaaucuucccgcggcagcucugauccccagggggugacauguggagccgccacccuguccgcugagagaguccggggcgacaacaaggaguacgaauauagcguggagugccaggaagauucugccuguccugcugccgaggaaucccuccccaucgaggugauggucgacgcgguucacaagcugaaauacgagaauuauacgagcuccuucuuuauucgcgacaucauuaagccugauccgcccaaaaaccugcagcucaagccucugaaaaauucuagacaaguggaagugagcugggaguaccccgacacaugguccaccccucauagcuacuucucucuuacauuuugcguccaggugcaggggaaguccaaacgggaaaagaaggaucgcguuuucaccgacaaaaccagcgccacagugaucuguagaaagaacgcuucuauuagcguccgggcccaggaucgcuauuacuccucuagcugguccgagugggcuagcgugcccugcucuugaggacuagugcaucacauuuaaaagcaucucagccuaccaugagaauaagagaaagaaaaugaagaucaauagcuuauucaucucuuuuucuuuuucguugguguaaagccaacacccugucuaaaaaacauaaauuucuuuaaucauuuugccucuuuucucugugcuucaauuaauaaaaaauggaaagaaccuagaucuaaaaaaaaaaaaaaaaaaaaaaaaaaaaaaaaaaaaaaaaaaaaaaaaaaaaaaaaaaaaaaaaugcaucccccccccccccccccccccccccccccccaaaggcucuuuucagagccaccagaauu

SEQ ID NO: 348 - RNA, 1366 nt, Artificial Sequence
  IL12B(1-328) mRNA product TOP UTR opt5
ggggcgcugccuacggagguggcagccaucuccuucucggcaucaagcuuaccaugugccaccagcaacuggugaucagcugguucucccucgucuuucuggccucuccccuuguugcuauuugggagcugaagaaagacguguacguggucgaacucgauugguauccugacgccccgggcgagauggugguucugaccugugauacacccgaagaggacgggaucacguggacccuugaucagagcuccgaagugcugggaucuggcaagacacucaccauucaggucaaagaguucggggacgcgggacaguacacaugccauaagggcggggaggugcugagccacucccugcuccugcuucauaaaaaggaagauggaaucuggucuaccgacauucugaaggaucaaaaagagccuaagaacaaaacauuucucagaugugaagcuaagaauuauagcggccgguuuaccugcugguggcugacgaccaucuccacagaccuuaccuucagcguuaaaucuucccgcggcagcucugauccccagggggugacauguggagccgccacccuguccgcugagagaguccggggcgacaacaaggaguacgaauauagcguggagugccaggaagauucugccuguccugcugccgaggaaucccuccccaucgaggugauggucgacgcgguucacaagcugaaauacgagaauuauacgagcuccuucuuuauucgcgacaucauuaagccugauccgcccaaaaaccugcagcucaagccucugaaaaauucuagacaaguggaagugagcugggaguaccccgacacaugguccaccccucauagcuacuucucucuuacauuuugcguccaggugcaggggaaguccaaacgggaaaagaaggaucgcguuuucaccgacaaaaccagcgccacagugaucuguagaaagaacgcuucuauuagcguccgggcccaggaucgcuauuacuccucuagcugguccgagugggcuagcgugcccugcucuggacuagugcaucacauuuaaaagcaucucagccuaccaugagaauaagagaaagaaaaugaagaucaauagcuuauucaucucuuuuucuuuuucguugguguaaagccaacacccugucuaaaaaacauaaauuucuuuaaucauuuugccucuuuucucugugcuucaauuaauaaaaaauggaaagaaccuagaucuaaaaaaaaaaaaaaaaaaaaaaaaaaaaaaaaaaaaaaaaaaaaaaaaaaaaaaaaaaaaaaaaugcaucccccccccccccccccccccccccccccccaaaggcucuuuucagagccaccagaauu

SEQ ID NO: 349 - RNA, 1303 nt, Artificial Sequence
  IL12B(23-328) mRNA product TOP UTR opt5
ggggcgcugccuacggagguggcagccaucuccuucucggcaucaagcuuaccauuugggagcugaagaaagacguguacguggucgaacucgauugguauccugacgccccgggcgagauggugguucugaccugugauacacccgaagaggacgggaucacguggacccuugaucagagcuccgaagugcugggaucuggcaagacacucaccauucaggucaaagaguucggggacgcgggacaguacacaugccauaagggcggggaggugcugagccacucccugcuccugcuucauaaaaaggaagauggaaucuggucuaccgacauucugaaggaucaaaaagagccuaagaacaaaacauuucucagaugugaagcuaagaauuauagcggccgguuuaccugcugguggcugacgaccaucuccacagaccuuaccuucagcguuaaaucuucccgcggcagcucugauccccagggggugacauguggagccgccacccuguccgcugagagaguccggggcgacaacaaggaguacgaauauagcguggagugccaggaagauucugccuguccugcugccgaggaaucccuccccaucgaggugauggucgacgcgguucacaagcugaaauacgagaauuauacgagcuccuucuuuauucgcgacaucauuaagccugauccgcccaaaaaccugcagcucaagccucugaaaaauucuagacaaguggaagugagcugggaguaccccgacacaugguccaccccucauagcuacuucucucuuacauuuugcguccaggugcaggggaaguccaaacgggaaaagaaggaucgcguuuucaccgacaaaaccagcgccacagugaucuguagaaagaacgcuucuauuagcguccgggcccaggaucgcuauuacuccucuagcugguccgagugggcuagcgugcccugcucuugaggacuagugcaucacauuuaaaagcaucucagccuaccaugagaauaagagaaagaaaaugaagaucaauagcuuauucaucucuuuuucuuuuucguugguguaaagccaacacccugucuaaaaaacauaaauuucuuuaaucauuuugccucuuuucucugugcuucaauuaauaaaaaauggaaagaaccuagaucuaaaaaaaaaaaaaaaaaaaaaaaaaaaaaaaaaaaaaaaaaaaaaaaaaaaaaaaaaaaaaaaaugcaucccccccccccccccccccccccccccccccaaaggcucuuuucagagccaccagaauu

SEQ ID NO: 350 - RNA, 436 nt, Artificial Sequence
  Linker-sFvCC49-218 mRNA product TOP UTR opt5
ggggcgcugccuacggagguggcagccaucuccuucucggcaucaagcuuaccggcagcaccuccgggucuggaaagcccggcagcggggagggauccacaaaaggcggacuagugcaucacauuuaaaagcaucucagccuaccaugagaauaagagaaagaaaaugaagaucaauagcuuauucaucucuuuuucuuuuucguugguguaaagccaacacccugucuaaaaaacauaaauuucuuuaaucauuuugccucuuuucucugugcuucaauuaauaaaaaauggaaagaaccuagaucuaaaaaaaaaaaaaaaaaaaaaaaaaaaaaaaaaaaaaaaaaaaaaaaaaaaaaaaaaaaaaaaaugcaucccccccccccccccccccccccccccccccaaaggcucuuuucagagccaccagaauu

SEQ ID NO: 351 - RNA, 2014 nt, Artificial Sequence
  IL12 mRNA product TOP UTR opt5
ggggcgcugccuacggagguggcagccaucuccuucucggcaucaagcuuaccaugugccaccagcaacuggugaucagcugguucucccucgucuuucuggccucuccccuuguugcuauuugggagcugaagaaagacguguacguggucgaacucgauugguauccugacgccccgggcgagauggugguucugaccugugauacacccgaagaggacgggaucacguggacccuugaucagagcuccgaagugcugggaucuggcaagacacucaccauucaggucaaagaguucggggacgcgggacaguacacaugccauaagggcggggaggugcugagccacucccugcuccugcuucauaaaaaggaagauggaaucuggucuaccgacauucugaaggaucaaaaagagccuaagaacaaaacauuucucagaugugaagcuaagaauuauagcggccgguuuaccugcugguggcugacgaccaucuccacagaccuuaccuucagcguuaaaucuucccgcggcagcucugauccccagggggugacauguggagccgccacccuguccgcugagagaguccggggcgacaacaaggaguacgaauauagcguggagugccaggaagauucugccuguccugcugccgaggaaucccuccccaucgaggugauggucgacgcgguucacaagcugaaauacgagaauuauacgagcuccuucuuuauucgcgacaucauuaagccugauccgcccaaaaaccugcagcucaagccucugaaaaauucuagacaaguggaagugagcugggaguaccccgacacaugguccaccccucauagcuacuucucucuuacauuuugcguccaggugcaggggaaguccaaacgggaaaagaaggaucgcguuuucaccgacaaaaccagcgccacagugaucuguagaaagaacgcuucuauuagcguccgggcccaggaucgcuauuacuccucuagcugguccgagugggcuagcgugcccugcucuggcagcaccuccgggucuggaaagcccggcagcggggagggauccacaaaaggccggaaccugccuguugcgacaccggaucccggcauguucccuugucuccaucacucucagaaucugcugcgcgcugugagcaacaugcuccaaaaggccagacagacgcuggaguuuuaccccugcaccuccgaagagaucgaccaugaagauauuacaaaagacaagaccucuacaguggaggccugucuuccucuggaacucaccaaaaaugagagcugccugaacucccgggagacaucuuucaucaccaaugggagcugucuugcuucccgcaagacgagcuuuaugauggcccugugccucucuuccauuuaugaagaucugaaaauguaccaggucgaguucaagaccaugaacgcuaagcugcucauggaccccaaaagacagaucuuucuggaucaaaauaugcuugccgugauugacgaacugaugcaggcgcucaacuucaauagcgagacaguuccucagaagucuucccuggaggaaccggauuuuuauaaaaccaagaucaaacuuuguauccugcuccacgccuuccggauucgcgcugugacaaucgacagagucaugagcuaccugaacgccucuugaggacuagugcaucacauuuaaaagcaucucagccuaccaugagaauaagagaaagaaaaugaagaucaauagcuuauucaucucuuuuucuuuuucguugguguaaagccaacacccugucuaaaaaacauaaauuucuuuaaucauuuugccucuuuucucugugcuucaauuaauaaaaaauggaaagaaccuagaucuaaaaaaaaaaaaaaaaaaaaaaaaaaaaaaaaaaaaaaaaaaaaaaaaaaaaaaaaaaaaaaaaugcaucccccccccccccccccccccccccccccccaaaggcucuuuucagagccaccagaauu

SEQ ID NO: 352 - RNA, 1168 nt, Artificial Sequence
  CD40LG mRNA product TOP UTR opt5
ggggcgcugccuacggagguggcagccaucuccuucucggcaucaagcuuaccaugaucgagaccuacaaccagacaagccccagauccgccgcuacgggccugccuauuucuaugaagaucuucauguaucuccugaccguguuucuuauuacacaaaugaucgggagcgcccuguucgcggucuaccuccaccggcgccuggacaaaauugaagaugagagaaaucuucaugaagacuuuguuuucaugaagaccauccagcggugcaacacaggagagcgcucccugucucuccugaauugugaagagaucaaaagccaguuugagggcuucgugaaggauauuaugcugaacaaagaagagaccaagaaggaaaauuccuuugagaugcagaaaggggaccaaaacccgcagaucgcugcccacgugauuucugaggccagcuccaagacaaccagcguccuccagugggcugaaaaaggauauuacacgaugucuaauaaccuggugacccuugagaauggcaagcagcugacaguuaaaagacaagggcucuauuacaucuaugcccaggugaccuucugcuccaaccgggaagcuagcucucaggcccccuuuauugcgucccugugucuuaagagcccuggacgcuucgagagaauccugcuccgggccgcuaauacacauucuuccgccaagcccugcggccagcaaagcauucaccugggcggggucuuugaacugcagccuggagcuuccguguucguuaacgugaccgaucccucucaggucagccauggcacgggguuuacauccuucggacuccugaaacuuugaggacuagugcaucacauuuaaaagcaucucagccuaccaugagaauaagagaaagaaaaugaagaucaauagcuuauucaucucuuuuucuuuuucguugguguaaagccaacacccugucuaaaaaacauaaauuucuuuaaucauuuugccucuuuucucugugcuucaauuaauaaaaaauggaaagaaccuagaucuaaaaaaaaaaaaaaaaaaaaaaaaaaaaaaaaaaaaaaaaaaaaaaaaaaaaaaaaaaaaaaaaugcaucccccccccccccccccccccccccccccccaaaggcucuuuucagagccaccagaauu

SEQ ID NO: 353 - RNA, 1249 nt, Artificial Sequence
  PDCD1 mRNA product TOP UTR opt6
ggggcgcugccuacggagguggcagccaucuccuucucggcaucaagcuuaccaugcaaauaccacaagcaccauggccaguaguaugggcuguacuacaauuagguuggcgaccaggaugguuuuuagacucaccagaucguccauggaacccaccaacauuuucaccagcauuauuaguaguaacagaaggagauaaugcaaccuuuacauguucauucaguaacacaucagaaaguuuuguacuaaauugguauagaaugucaccuucaaaucaaacagauaaauuagcagcauuuccagaagauagaucacaaccaggacaagauugcagauuuagaguaacacaauuaccuaauggacgagacuuucauaugucaguaguaagagcucgacguaacgauucaggaacauacuuauguggagcaauaucauuagcaccaaaagcacaaauaaaagaaucuuuaagagcagaauuaagaguaacagaaagacgcgcagaaguaccaacagcacauccaagcccuucaccacgaccugcaggacaauuucaaacauuaguagucggaguaguaggaggauuauuagguucacugguauuauuaguauggguauuagcaguaauaugcuccagagcagcaagaggaacaauaggagcaagaagaacaggacaaccauuaaaagaagacccaucugcaguaccaguauuuucaguugacuauggagaacuagauuuccaauggagggaaaaaacaccagaaccuccaguuccauguguaccagaacaaacagaauaugcaacaauuguauuucccucaggaaugggaacaucuaguccagcaagaagaggaucagcugauggaccaagaucagcacaaccauuaagaccagaagauggacauuguucauggccauuauaaggacuagugcaucacauuuaaaagcaucucagccuaccaugagaauaagagaaagaaaaugaagaucaauagcuuauucaucucuuuuucuuuuucguugguguaaagccaacacccugucuaaaaaacauaaauuucuuuaaucauuuugccucuuuucucugugcuucaauuaauaaaaaauggaaagaaccuagaucuaaaaaaaaaaaaaaaaaaaaaaaaaaaaaaaaaaaaaaaaaaaaaaaaaaaaaaaaaaaaaaaaugcaucccccccccccccccccccccccccccccccaaaggcucuuuucagagccaccagaauu

SEQ ID NO: 354 - RNA, 832 nt, Artificial Sequence
  PDCD1(1-149) mRNA product TOP UTR opt6
ggggcgcugccuacggagguggcagccaucuccuucucggcaucaagcuuaccaugcaaauaccacaagcaccauggccaguaguaugggcuguacuacaauuagguuggcgaccaggaugguuuuuagacucaccagaucguccauggaacccaccaacauuuucaccagcauuauuaguaguaacagaaggagauaaugcaaccuuuacauguucauucaguaacacaucagaaaguuuuguacuaaauugguauagaaugucaccuucaaaucaaacagauaaauuagcagcauuuccagaagauagaucacaaccaggacaagauugcagauuuagaguaacacaauuaccuaauggacgagacuuucauaugucaguaguaagagcucgacguaacgauucaggaacauacuuauguggagcaauaucauuagcaccaaaagcacaaauaaaagaaucuuuaagagcagaauuaagaguaacagaaagacgcgcauaaggacuagugcaucacauuuaaaagcaucucagccuaccaugagaauaagagaaagaaaaugaagaucaauagcuuauucaucucuuuuucuuuuucguugguguaaagccaacacccugucuaaaaaacauaaauuucuuuaaucauuuugccucuuuucucugugcuucaauuaauaaaaaauggaaagaaccuagaucuaaaaaaaaaaaaaaaaaaaaaaaaaaaaaaaaaaaaaaaaaaaaaaaaaaaaaaaaaaaaaaaaugcaucccccccccccccccccccccccccccccccaaaggcucuuuucagagccaccagaauu

SEQ ID NO: 355 - RNA, 1042 nt, Artificial Sequence
  IL12A mRNA product TOP UTR opt6
ggggcgcugccuacggagguggcagccaucuccuucucggcaucaagcuuaccaugugcccagcaagaucacuacuacugguagcaacacugguacuacuagaccaccuaucacucgccagaaaccucccaguagccacaccagacccaggaauguuccccugccuccaccauucccaaaaccuacuaagagcaguaucaaacaugcuacaaaaagcaagacaaacacuagaguucuauccaugcacaucagaagaaauagaccacgaagacauaacaaaagacaaaacaucaaccguagaagcaugccucccacucgaacucacaaaaaacgaaucaugccuaaacucaagagaaacaucauucauaacaaacggcucaugcuuagccucaagaaaaacaucauucaugauggcacuaugccucucauccauauaugaagacuuaaaaauguaccaaguagaauuuaaaaccaugaacgcaaaauuacuaauggacccaaaaagacaaauauuccuagaccaaaacaugcuagcaguaauagacgaacuaaugcaagcacuaaacuucaacucagaaaccguaccccaaaaaucaucucuagaagaaccagacuucuacaaaacaaaaauaaaacuaugcauacuacuacacgccuucagaauaagagccgucacaauagacagagucaugucauaccuaaacgccucauaaggacuagugcaucacauuuaaaagcaucucagccuaccaugagaauaagagaaagaaaaugaagaucaauagcuuauucaucucuuuuucuuuuucguugguguaaagccaacacccugucuaaaaaacauaaauuucuuuaaucauuuugccucuuuucucugugcuucaauuaauaaaaaauggaaagaaccuagaucuaaaaaaaaaaaaaaaaaaaaaaaaaaaaaaaaaaaaaaaaaaaaaaaaaaaaaaaaaaaaaaaaugcaucccccccccccccccccccccccccccccccaaaggcucuuuucagagccaccagaauu

SEQ ID NO: 356 - RNA, 1039 nt, Artificial Sequence
  IL12A(1-219) mRNA product TOP UTR opt6
ggggcgcugccuacggagguggcagccaucuccuucucggcaucaagcuuaccaugugcccagcaagaucacuacuacugguagcaacacugguacuacuagaccaccuaucacucgccagaaaccucccaguagccacaccagacccaggaauguuccccugccuccaccauucccaaaaccuacuaagagcaguaucaaacaugcuacaaaaagcaagacaaacacuagaguucuauccaugcacaucagaagaaauagaccacgaagacauaacaaaagacaaaacaucaaccguagaagcaugccucccacucgaacucacaaaaaacgaaucaugccuaaacucaagagaaacaucauucauaacaaacggcucaugcuuagccucaagaaaaacaucauucaugauggcacuaugccucucauccauauaugaagacuuaaaaauguaccaaguagaauuuaaaaccaugaacgcaaaauuacuaauggacccaaaaagacaaauauuccuagaccaaaacaugcuagcaguaauagacgaacuaaugcaagcacuaaacuucaacucagaaaccguaccccaaaaaucaucucuagaagaaccagacuucuacaaaacaaaaauaaaacuaugcauacuacuacacgccuucagaauaagagccgucacaauagacagagucaugucauaccuaaacgccucaggacuagugcaucacauuuaaaagcaucucagccuaccaugagaauaagagaaagaaaaugaagaucaauagcuuauucaucucuuuuucuuuuucguugguguaaagccaacacccugucuaaaaaacauaaauuucuuuaaucauuuugccucuuuucucugugcuucaauuaauaaaaaauggaaagaaccuagaucuaaaaaaaaaaaaaaaaaaaaaaaaaaaaaaaaaaaaaaaaaaaaaaaaaaaaaaaaaaaaaaaaugcaucccccccccccccccccccccccccccccccaaaggcucuuuucagagccaccagaauu

SEQ ID NO: 357 - RNA, 976 nt, Artificial Sequence
  IL12A(23-219) mRNA product TOP UTR opt6
ggggcgcugccuacggagguggcagccaucuccuucucggcaucaagcuuaccagaaaccucccaguagccacaccagacccaggaauguuccccugccuccaccauucccaaaaccuacuaagagcaguaucaaacaugcuacaaaaagcaagacaaacacuagaguucuauccaugcacaucagaagaaauagaccacgaagacauaacaaaagacaaaacaucaaccguagaagcaugccucccacucgaacucacaaaaaacgaaucaugccuaaacucaagagaaacaucauucauaacaaacggcucaugcuuagccucaagaaaaacaucauucaugauggcacuaugccucucauccauauaugaagacuuaaaaauguaccaaguagaauuuaaaaccaugaacgcaaaauuacuaauggacccaaaaagacaaauauuccuagaccaaaacaugcuagcaguaauagacgaacuaaugcaagcacuaaacuucaacucagaaaccguaccccaaaaaucaucucuagaagaaccagacuucuacaaaacaaaaauaaaacuaugcauacuacuacacgccuucagaauaagagccgucacaauagacagagucaugucauaccuaaacgccucauaaggacuagugcaucacauuuaaaagcaucucagccuaccaugagaauaagagaaagaaaaugaagaucaauagcuuauucaucucuuuuucuuuuucguugguguaaagccaacacccugucuaaaaaacauaaauuucuuuaaucauuuugccucuuuucucugugcuucaauuaauaaaaaauggaaagaaccuagaucuaaaaaaaaaaaaaaaaaaaaaaaaaaaaaaaaaaaaaaaaaaaaaaaaaaaaaaaaaaaaaaaaugcaucccccccccccccccccccccccccccccccaaaggcucuuuucagagccaccagaauu

SEQ ID NO: 358 - RNA, 1369 nt, Artificial Sequence
  IL12B mRNA product TOP UTR opt6
ggggcgcugccuacggagguggcagccaucuccuucucggcaucaagcuuaccaugugccaccaacaacugguaauaucaugguucucacugguauucuuggcaucaccccuaguagcaauaugggaacuaaaaaaagacguauacguaguagaacuagacugguacccagacgcaccaggagaaaugguaguauuaacaugcgacacaccagaagaagauggaauaacuuggacauuagaccaaucaagugaaguauuaggaucaggcaaaacacuaacuauacaaguaaaagaauuuggagacgcaggacaauacacgugccacaaaggaggcgaaguccuaucacauucacuacuauuauuacacaaaaaagaagacggaaucuggagcacagacauauuaaaagaccaaaaagaaccaaaaaacaaaacauuucuaagaugcgaagcuaaaaacuauucaggaagauucacaugcugguggcuaacaaccaucaguaccgacuuaacauucucaguaaaaucaucaagaggaucaucagacccacaaggaguaacauguggagcagcaacacuaagcgcagaaagaguacgaggagacaacaaagaauacgaauauucaguagaaugucaagaagacucagcaugcccugcagcagaagaaucauuaccaauagaaguaauggucgacgcuguacacaaacuaaaauaugaaaauuacacaagcaguuucuucauaagagacauaauaaaacccgacccaccaaaaaaccuacaacuaaaaccauuaaaaaauucaagacaaguagaaguaucaugggaauacccagauacauggagcacaccacacaguuacuucucauuaacauucugcguacaaguacaaggaaaaaguaaaagagaaaaaaaagacagaguauucacagauaagacuucagcaacaguaauaugcagaaaaaacgcaagcauaagcguacgagcacaagacagauauuacucaagcucauggucagaaugggcaucaguaccauguucauaaggacuagugcaucacauuuaaaagcaucucagccuaccaugagaauaagagaaagaaaaugaagaucaauagcuuauucaucucuuuuucuuuuucguugguguaaagccaacacccugucuaaaaaacauaaauuucuuuaaucauuuugccucuuuucucugugcuucaauuaauaaaaaauggaaagaaccuagaucuaaaaaaaaaaaaaaaaaaaaaaaaaaaaaaaaaaaaaaaaaaaaaaaaaaaaaaaaaaaaaaaaugcaucccccccccccccccccccccccccccccccaaaggcucuuuucagagccaccagaauu

SEQ ID NO: 359 - RNA, 1366 nt, Artificial Sequence
  IL12B(1-328) mRNA product TOP UTR opt6
ggggcgcugccuacggagguggcagccaucuccuucucggcaucaagcuuaccaugugccaccaacaacugguaauaucaugguucucacugguauucuuggcaucaccccuaguagcaauaugggaacuaaaaaaagacguauacguaguagaacuagacugguacccagacgcaccaggagaaaugguaguauuaacaugcgacacaccagaagaagauggaauaacuuggacauuagaccaaucaagugaaguauuaggaucaggcaaaacacuaacuauacaaguaaaagaauuuggagacgcaggacaauacacgugccacaaaggaggcgaaguccuaucacauucacuacuauuauuacacaaaaaagaagacggaaucuggagcacagacauauuaaaagaccaaaaagaaccaaaaaacaaaacauuucuaagaugcgaagcuaaaaacuauucaggaagauucacaugcugguggcuaacaaccaucaguaccgacuuaacauucucaguaaaaucaucaagaggaucaucagacccacaaggaguaacauguggagcagcaacacuaagcgcagaaagaguacgaggagacaacaaagaauacgaauauucaguagaaugucaagaagacucagcaugcccugcagcagaagaaucauuaccaauagaaguaauggucgacgcuguacacaaacuaaaauaugaaaauuacacaagcaguuucuucauaagagacauaauaaaacccgacccaccaaaaaaccuacaacuaaaaccauuaaaaaauucaagacaaguagaaguaucaugggaauacccagauacauggagcacaccacacaguuacuucucauuaacauucugcguacaaguacaaggaaaaaguaaaagagaaaaaaaagacagaguauucacagauaagacuucagcaacaguaauaugcagaaaaaacgcaagcauaagcguacgagcacaagacagauauuacucaagcucauggucagaaugggcaucaguaccauguucaggacuagugcaucacauuuaaaagcaucucagccuaccaugagaauaagagaaagaaaaugaagaucaauagcuuauucaucucuuuuucuuuuucguugguguaaagccaacacccugucuaaaaaacauaaauuucuuuaaucauuuugccucuuuucucugugcuucaauuaauaaaaaauggaaagaaccuagaucuaaaaaaaaaaaaaaaaaaaaaaaaaaaaaaaaaaaaaaaaaaaaaaaaaaaaaaaaaaaaaaaaugcaucccccccccccccccccccccccccccccccaaaggcucuuuucagagccaccagaauu

SEQ ID NO: 360 - RNA, 1303 nt, Artificial Sequence
  IL12B(23-328) mRNA product TOP UTR opt6
ggggcgcugccuacggagguggcagccaucuccuucucggcaucaagcuuaccauaugggaacuaaaaaaagacguauacguaguagaacuagacugguacccagacgcaccaggagaaaugguaguauuaacaugcgacacaccagaagaagauggaauaacuuggacauuagaccaaucaagugaaguauuaggaucaggcaaaacacuaacuauacaaguaaaagaauuuggagacgcaggacaauacacgugccacaaaggaggcgaaguccuaucacauucacuacuauuauuacacaaaaaagaagacggaaucuggagcacagacauauuaaaagaccaaaaagaaccaaaaaacaaaacauuucuaagaugcgaagcuaaaaacuauucaggaagauucacaugcugguggcuaacaaccaucaguaccgacuuaacauucucaguaaaaucaucaagaggaucaucagacccacaaggaguaacauguggagcagcaacacuaagcgcagaaagaguacgaggagacaacaaagaauacgaauauucaguagaaugucaagaagacucagcaugcccugcagcagaagaaucauuaccaauagaaguaauggucgacgcuguacacaaacuaaaauaugaaaauuacacaagcaguuucuucauaagagacauaauaaaacccgacccaccaaaaaaccuacaacuaaaaccauuaaaaaauucaagacaaguagaaguaucaugggaauacccagauacauggagcacaccacacaguuacuucucauuaacauucugcguacaaguacaaggaaaaaguaaaagagaaaaaaaagacagaguauucacagauaagacuucagcaacaguaauaugcagaaaaaacgcaagcauaagcguacgagcacaagacagauauuacucaagcucauggucagaaugggcaucaguaccauguucauaaggacuagugcaucacauuuaaaagcaucucagccuaccaugagaauaagagaaagaaaaugaagaucaauagcuuauucaucucuuuuucuuuuucguugguguaaagccaacacccugucuaaaaaacauaaauuucuuuaaucauuuugccucuuuucucugugcuucaauuaauaaaaaauggaaagaaccuagaucuaaaaaaaaaaaaaaaaaaaaaaaaaaaaaaaaaaaaaaaaaaaaaaaaaaaaaaaaaaaaaaaaugcaucccccccccccccccccccccccccccccccaaaggcucuuuucagagccaccagaauu

SEQ ID NO: 361 - RNA, 436 nt, Artificial Sequence
  Linker-sFvCC49-218 mRNA product TOP UTR opt6
ggggcgcugccuacggagguggcagccaucuccuucucggcaucaagcuuaccggaaguacaaguggaaguggaaaaccaggaaguggagaaggaaguacaaaaggaggacuagugcaucacauuuaaaagcaucucagccuaccaugagaauaagagaaagaaaaugaagaucaauagcuuauucaucucuuuuucuuuuucguugguguaaagccaacacccugucuaaaaaacauaaauuucuuuaaucauuuugccucuuuucucugugcuucaauuaauaaaaaauggaaagaaccuagaucuaaaaaaaaaaaaaaaaaaaaaaaaaaaaaaaaaaaaaaaaaaaaaaaaaaaaaaaaaaaaaaaaugcaucccccccccccccccccccccccccccccccaaaggcucuuuucagagccaccagaauu

SEQ ID NO: 362 - RNA, 2014 nt, Artificial Sequence
  IL12 mRNA product TOP UTR opt6
ggggcgcugccuacggagguggcagccaucuccuucucggcaucaagcuuaccaugugccaccaacaacugguaauaucaugguucucacugguauucuuggcaucaccccuaguagcaauaugggaacuaaaaaaagacguauacguaguagaacuagacugguacccagacgcaccaggagaaaugguaguauuaacaugcgacacaccagaagaagauggaauaacuuggacauuagaccaaucaagugaaguauuaggaucaggcaaaacacuaacuauacaaguaaaagaauuuggagacgcaggacaauacacgugccacaaaggaggcgaaguccuaucacauucacuacuauuauuacacaaaaaagaagacggaaucuggagcacagacauauuaaaagaccaaaaagaaccaaaaaacaaaacauuucuaagaugcgaagcuaaaaacuauucaggaagauucacaugcugguggcuaacaaccaucaguaccgacuuaacauucucaguaaaaucaucaagaggaucaucagacccacaaggaguaacauguggagcagcaacacuaagcgcagaaagaguacgaggagacaacaaagaauacgaauauucaguagaaugucaagaagacucagcaugcccugcagcagaagaaucauuaccaauagaaguaauggucgacgcuguacacaaacuaaaauaugaaaauuacacaagcaguuucuucauaagagacauaauaaaacccgacccaccaaaaaaccuacaacuaaaaccauuaaaaaauucaagacaaguagaaguaucaugggaauacccagauacauggagcacaccacacaguuacuucucauuaacauucugcguacaaguacaaggaaaaaguaaaagagaaaaaaaagacagaguauucacagauaagacuucagcaacaguaauaugcagaaaaaacgcaagcauaagcguacgagcacaagacagauauuacucaagcucauggucagaaugggcaucaguaccauguucaggaaguacaaguggaaguggaaaaccaggaaguggagaaggaaguacaaaaggaagaaaccucccaguagccacaccagacccaggaauguuccccugccuccaccauucccaaaaccuacuaagagcaguaucaaacaugcuacaaaaagcaagacaaacacuagaguucuauccaugcacaucagaagaaauagaccacgaagacauaacaaaagacaaaacaucaaccguagaagcaugccucccacucgaacucacaaaaaacgaaucaugccuaaacucaagagaaacaucauucauaacaaacggcucaugcuuagccucaagaaaaacaucauucaugauggcacuaugccucucauccauauaugaagacuuaaaaauguaccaaguagaauuuaaaaccaugaacgcaaaauuacuaauggacccaaaaagacaaauauuccuagaccaaaacaugcuagcaguaauagacgaacuaaugcaagcacuaaacuucaacucagaaaccguaccccaaaaaucaucucuagaagaaccagacuucuacaaaacaaaaauaaaacuaugcauacuacuacacgccuucagaauaagagccgucacaauagacagagucaugucauaccuaaacgccucauaaggacuagugcaucacauuuaaaagcaucucagccuaccaugagaauaagagaaagaaaaugaagaucaauagcuuauucaucucuuuuucuuuuucguugguguaaagccaacacccugucuaaaaaacauaaauuucuuuaaucauuuugccucuuuucucugugcuucaauuaauaaaaaauggaaagaaccuagaucuaaaaaaaaaaaaaaaaaaaaaaaaaaaaaaaaaaaaaaaaaaaaaaaaaaaaaaaaaaaaaaaaugcaucccccccccccccccccccccccccccccccaaaggcucuuuucagagccaccagaauu

SEQ ID NO: 363 - RNA, 1168 nt, Artificial Sequence
  CD40LG mRNA product TOP UTR opt6
ggggcgcugccuacggagguggcagccaucuccuucucggcaucaagcuuaccaugauagaaacauauaaucaaacaagcccaagaucagcagcaacaggacuaccaauaucaaugaaaauauucauguaccuacucacagucuuccuaauaacacaaaugauaggaucugcccuauuugcaguauaccuacacagaagacuagauaaaauagaagacgaaagaaaccuacaugaagacuucguauucaugaaaacaauacaaagaugcaacaccggagaaagaucccuaucacuacuaaacugcgaagaaauaaaaucacaauucgaaggauucguaaaagacauaaugcuaaacaaagaagaaacaaaaaaagaaaacucuuucgaaaugcaaaaaggagaccaaaacccacaaauagcugcacacgucauaucagaagcaucaucaaaaacaacaucaguacuucaaugggcagaaaaaggauacuauacaaugucaaacaaucuaguaacccuagaaaacggaaaacaacuaacaguaaaaagacaaggacuauacuauauauacgcacaaguaacauucugcucaaacagagaagcaucaucacaagcaccauucaucgcaucacuaugccuaaaauccccaggaagauucgaacgaauccuacuaagagcagcaaacacacacucaucagcaaaaccaugcggccaacaaucaauacaccuaggaggaguauucgaacuacaaccaggagcaucaguauucguaaacguaacagaccccucacaaguaagccacggcacaggauucacaucauuuggacuauuaaaauuauaaggacuagugcaucacauuuaaaagcaucucagccuaccaugagaauaagagaaagaaaaugaagaucaauagcuuauucaucucuuuuucuuuuucguugguguaaagccaacacccugucuaaaaaacauaaauuucuuuaaucauuuugccucuuuucucugugcuucaauuaauaaaaaauggaaagaaccuagaucuaaaaaaaaaaaaaaaaaaaaaaaaaaaaaaaaaaaaaaaaaaaaaaaaaaaaaaaaaaaaaaaaugcaucccccccccccccccccccccccccccccccaaaggcucuuuucagagccaccagaauu

SEQ ID NO: 364 - RNA, 1249 nt, Artificial Sequence
  PDCD1 mRNA product TOP UTR opt7
ggggcgcugccuacggagguggcagccaucuccuucucggcaucaagcuuaccaugcagaucccccaagccccauggccgguggucugggcagugcugcagcucggcuggaggcccgggugguuccuggacagcccagaucggcccuggaacccacccaccuuuuccccagccuugcugguagugacugagggugacaaugcgaccuucacgugcaguuuuagcaacacuuccgaaaguuucguccucaauugguaccgcaugagcccguccaaccagaccgauaagcuggccgcauuucccgaggacaggagccagccaggccaagauugucgguuccgcgugacccaguugcccaaugggagggacuuucacauguccgugguccgggcccgcaggaacgauaguggcacuuaucugugcggugcaauuagccucgccccaaaagcgcagaucaaggaaucccugcgggccgagcugcgcgugaccgaaaggcgggcagagguacccacggcccauccgagccccaguccacgccccgccgggcaguuccaaacucucguggucggcguggugggcgggcuguuggguucccugguccuccugguguggguacuggcagugauuuguagcagggccgcgcggggcaccaucggggcccgcaggacuggccagccauugaaagaggaccccuccgcagucccaguguuuaguguggauuacggugaacucgacuuccaguggcgggagaagaccccggaacccccaguccccugcgugccagagcagaccgaguaugccacgauuguauuucccagcgggaugggcacuuccagcccggcacgcaggggcagugccgaugggccacgguccgcccaaccccugaggcccgaagacggucacuguagcuggccacugugaggacuagugcaucacauuuaaaagcaucucagccuaccaugagaauaagagaaagaaaaugaagaucaauagcuuauucaucucuuuuucuuuuucguugguguaaagccaacacccugucuaaaaaacauaaauuucuuuaaucauuuugccucuuuucucugugcuucaauuaauaaaaaauggaaagaaccuagaucuaaaaaaaaaaaaaaaaaaaaaaaaaaaaaaaaaaaaaaaaaaaaaaaaaaaaaaaaaaaaaaaaugcaucccccccccccccccccccccccccccccccaaaggcucuuuucagagccaccagaauu

SEQ ID NO: 365 - RNA, 832 nt, Artificial Sequence
  PDCD1(1-149) mRNA product TOP UTR opt7
ggggcgcugccuacggagguggcagccaucuccuucucggcaucaagcuuaccaugcagaucccccaagccccauggccgguggucugggcagugcugcagcucggcuggaggcccgggugguuccuggacagcccagaucggcccuggaacccacccaccuuuuccccagccuugcugguagugacugagggugacaaugcgaccuucacgugcaguuuuagcaacacuuccgaaaguuucguccucaauugguaccgcaugagcccguccaaccagaccgauaagcuggccgcauuucccgaggacaggagccagccaggccaagauugucgguuccgcgugacccaguugcccaaugggagggacuuucacauguccgugguccgggcccgcaggaacgauaguggcacuuaucugugcggugcaauuagccucgccccaaaagcgcagaucaaggaaucccugcgggccgagcugcgcgugaccgaaaggcgggcaugaggacuagugcaucacauuuaaaagcaucucagccuaccaugagaauaagagaaagaaaaugaagaucaauagcuuauucaucucuuuuucuuuuucguugguguaaagccaacacccugucuaaaaaacauaaauuucuuuaaucauuuugccucuuuucucugugcuucaauuaauaaaaaauggaaagaaccuagaucuaaaaaaaaaaaaaaaaaaaaaaaaaaaaaaaaaaaaaaaaaaaaaaaaaaaaaaaaaaaaaaaaugcaucccccccccccccccccccccccccccccccaaaggcucuuuucagagccaccagaauu

SEQ ID NO: 366 - RNA, 1042 nt, Artificial Sequence
  IL12A mRNA product TOP UTR opt7
ggggcgcugccuacggagguggcagccaucuccuucucggcaucaagcuuaccaugugccccgccaggagccugcuccugguggcaaccuugguccugcucgaccaccuguccuuggcccggaaccugccaguggcgacuccggaucccggcauguucccaugucuccaucacagucagaaucugcugcgcgccguaagcaacaugcuccaaaaggcaaggcagacccuggaguuuuaccccugcacguccgaagagaucgaccaugaagauauuacuaaagacaagaccaguaccguggaggccuguuugccacuggaacucacuaaaaaugagagcugccugaacucccgggagaccagcuucaucacgaauggguccugucuggcaagucgcaagacuagcuuuaugauggccuugugccucuccagcauuuaugaagaucugaaaauguaccaggucgaguucaagaccaugaacgcgaagcugcucauggaccccaaaaggcagaucuuucuggaucaaaauauguuggccgugauugacgaacugaugcaggcacucaacuucaauagugagacugugccacagaaguccagccuggaggaaccggauuuuuauaaaaccaagaucaaacuguguaucuugcuccacgccuuccggauucgcgccgucaccaucgacagggugauguccuaccugaacgcaaguugaggacuagugcaucacauuuaaaagcaucucagccuaccaugagaauaagagaaagaaaaugaagaucaauagcuuauucaucucuuuuucuuuuucguugguguaaagccaacacccugucuaaaaaacauaaauuucuuuaaucauuuugccucuuuucucugugcuucaauuaauaaaaaauggaaagaaccuagaucuaaaaaaaaaaaaaaaaaaaaaaaaaaaaaaaaaaaaaaaaaaaaaaaaaaaaaaaaaaaaaaaaugcaucccccccccccccccccccccccccccccccaaaggcucuuuucagagccaccagaauu

SEQ ID NO: 367 - RNA, 1039 nt, Artificial Sequence
  IL12A(1-219) mRNA product TOP UTR opt7
ggggcgcugccuacggagguggcagccaucuccuucucggcaucaagcuuaccaugugccccgccaggagccugcuccugguggcaaccuugguccugcucgaccaccuguccuuggcccggaaccugccaguggcgacuccggaucccggcauguucccaugucuccaucacagucagaaucugcugcgcgccguaagcaacaugcuccaaaaggcaaggcagacccuggaguuuuaccccugcacguccgaagagaucgaccaugaagauauuacuaaagacaagaccaguaccguggaggccuguuugccacuggaacucacuaaaaaugagagcugccugaacucccgggagaccagcuucaucacgaauggguccugucuggcaagucgcaagacuagcuuuaugauggccuugugccucuccagcauuuaugaagaucugaaaauguaccaggucgaguucaagaccaugaacgcgaagcugcucauggaccccaaaaggcagaucuuucuggaucaaaauauguuggccgugauugacgaacugaugcaggcacucaacuucaauagugagacugugccacagaaguccagccuggaggaaccggauuuuuauaaaaccaagaucaaacuguguaucuugcuccacgccuuccggauucgcgccgucaccaucgacagggugauguccuaccugaacgcaaguggacuagugcaucacauuuaaaagcaucucagccuaccaugagaauaagagaaagaaaaugaagaucaauagcuuauucaucucuuuuucuuuuucguugguguaaagccaacacccugucuaaaaaacauaaauuucuuuaaucauuuugccucuuuucucugugcuucaauuaauaaaaaauggaaagaaccuagaucuaaaaaaaaaaaaaaaaaaaaaaaaaaaaaaaaaaaaaaaaaaaaaaaaaaaaaaaaaaaaaaaaugcaucccccccccccccccccccccccccccccccaaaggcucuuuucagagccaccagaauu

SEQ ID NO: 368 - RNA, 976 nt, Artificial Sequence
  IL12A(23-219) mRNA product TOP UTR opt7
ggggcgcugccuacggagguggcagccaucuccuucucggcaucaagcuuacccggaaccugccaguggcgacuccggaucccggcauguucccaugucuccaucacagucagaaucugcugcgcgccguaagcaacaugcuccaaaaggcaaggcagacccuggaguuuuaccccugcacguccgaagagaucgaccaugaagauauuacuaaagacaagaccaguaccguggaggccuguuugccacuggaacucacuaaaaaugagagcugccugaacucccgggagaccagcuucaucacgaauggguccugucuggcaagucgcaagacuagcuuuaugauggccuugugccucuccagcauuuaugaagaucugaaaauguaccaggucgaguucaagaccaugaacgcgaagcugcucauggaccccaaaaggcagaucuuucuggaucaaaauauguuggccgugauugacgaacugaugcaggcacucaacuucaauagugagacugugccacagaaguccagccuggaggaaccggauuuuuauaaaaccaagaucaaacuguguaucuugcuccacgccuuccggauucgcgccgucaccaucgacagggugauguccuaccugaacgcaaguugaggacuagugcaucacauuuaaaagcaucucagccuaccaugagaauaagagaaagaaaaugaagaucaauagcuuauucaucucuuuuucuuuuucguugguguaaagccaacacccugucuaaaaaacauaaauuucuuuaaucauuuugccucuuuucucugugcuucaauuaauaaaaaauggaaagaaccuagaucuaaaaaaaaaaaaaaaaaaaaaaaaaaaaaaaaaaaaaaaaaaaaaaaaaaaaaaaaaaaaaaaaugcaucccccccccccccccccccccccccccccccaaaggcucuuuucagagccaccagaauu

SEQ ID NO: 369 - RNA, 1369 nt, Artificial Sequence
  IL12B mRNA product TOP UTR opt7
ggggcgcugccuacggagguggcagccaucuccuucucggcaucaagcuuaccaugugccaccagcaacuggugaucagcugguucucccucgucuuucuggccagucccuugguggcaauuugggagcugaagaaagacguauacguggucgaacucgauugguauccagacgccccgggcgagaugguggugcugaccugugauacucccgaagaggacgggaucaccuggacguuggaucagagcuccgaaguccuggguaguggcaagacucucaccauucaggugaaagaguucggggacgcgggccaguauaccugccauaaggguggggagguacugagccacucccugcuccuguugcauaaaaaggaagauggcaucuggagcacugacauucugaaggaucaaaaagagccaaagaacaaaaccuuucucaggugugaagccaagaauuacuccggccgguucacgugcugguggcugacuaccaucaguacugaccugaccuuuagcgugaaauccagccgcgggaguuccgauccccagggugucaccuguggcgcagccacguugagcgcagagagggugcgcggggacaacaaggaguacgaauauuccguggagugccaggaagauagugccuguccagcggccgaggaaagccuccccaucgaggucaugguggacgcaguacacaaacugaaguacgagaauuauacuuccagcuucuuuauucgggacaucauuaagccagauccgcccaaaaaccugcagcucaagccacugaaaaauaguaggcaaguggaagucuccugggaguaccccgacaccuggagcacuccacauaguuacuucuccuugaccuuuugcguccaggugcagggcaagagcaaacgggaaaagaaggaucgcguguucaccgacaaaacuagcgccacggugaucuguaggaagaacgccuccauuaguguacgggcacaggaucgcuauuacagcuccagcuggagugagugggccuccgugcccugcagcugaggacuagugcaucacauuuaaaagcaucucagccuaccaugagaauaagagaaagaaaaugaagaucaauagcuuauucaucucuuuuucuuuuucguugguguaaagccaacacccugucuaaaaaacauaaauuucuuuaaucauuuugccucuuuucucugugcuucaauuaauaaaaaauggaaagaaccuagaucuaaaaaaaaaaaaaaaaaaaaaaaaaaaaaaaaaaaaaaaaaaaaaaaaaaaaaaaaaaaaaaaaugcaucccccccccccccccccccccccccccccccaaaggcucuuuucagagccaccagaauu

SEQ ID NO: 370 - RNA, 1366 nt, Artificial Sequence
  IL12B(1-328) mRNA product TOP UTR opt7
ggggcgcugccuacggagguggcagccaucuccuucucggcaucaagcuuaccaugugccaccagcaacuggugaucagcugguucucccucgucuuucuggccagucccuugguggcaauuugggagcugaagaaagacguauacguggucgaacucgauugguauccagacgccccgggcgagaugguggugcugaccugugauacucccgaagaggacgggaucaccuggacguuggaucagagcuccgaaguccuggguaguggcaagacucucaccauucaggugaaagaguucggggacgcgggccaguauaccugccauaaggguggggagguacugagccacucccugcuccuguugcauaaaaaggaagauggcaucuggagcacugacauucugaaggaucaaaaagagccaaagaacaaaaccuuucucaggugugaagccaagaauuacuccggccgguucacgugcugguggcugacuaccaucaguacugaccugaccuuuagcgugaaauccagccgcgggaguuccgauccccagggugucaccuguggcgcagccacguugagcgcagagagggugcgcggggacaacaaggaguacgaauauuccguggagugccaggaagauagugccuguccagcggccgaggaaagccuccccaucgaggucaugguggacgcaguacacaaacugaaguacgagaauuauacuuccagcuucuuuauucgggacaucauuaagccagauccgcccaaaaaccugcagcucaagccacugaaaaauaguaggcaaguggaagucuccugggaguaccccgacaccuggagcacuccacauaguuacuucuccuugaccuuuugcguccaggugcagggcaagagcaaacgggaaaagaaggaucgcguguucaccgacaaaacuagcgccacggugaucuguaggaagaacgccuccauuaguguacgggcacaggaucgcuauuacagcuccagcuggagugagugggccuccgugcccugcagcggacuagugcaucacauuuaaaagcaucucagccuaccaugagaauaagagaaagaaaaugaagaucaauagcuuauucaucucuuuuucuuuuucguugguguaaagccaacacccugucuaaaaaacauaaauuucuuuaaucauuuugccucuuuucucugugcuucaauuaauaaaaaauggaaagaaccuagaucuaaaaaaaaaaaaaaaaaaaaaaaaaaaaaaaaaaaaaaaaaaaaaaaaaaaaaaaaaaaaaaaaugcaucccccccccccccccccccccccccccccccaaaggcucuuuucagagccaccagaauu

SEQ ID NO: 371 - RNA, 1303 nt, Artificial Sequence
  IL12B(23-328) mRNA product TOP UTR opt7
ggggcgcugccuacggagguggcagccaucuccuucucggcaucaagcuuaccauuugggagcugaagaaagacguauacguggucgaacucgauugguauccagacgccccgggcgagaugguggugcugaccugugauacucccgaagaggacgggaucaccuggacguuggaucagagcuccgaaguccuggguaguggcaagacucucaccauucaggugaaagaguucggggacgcgggccaguauaccugccauaaggguggggagguacugagccacucccugcuccuguugcauaaaaaggaagauggcaucuggagcacugacauucugaaggaucaaaaagagccaaagaacaaaaccuuucucaggugugaagccaagaauuacuccggccgguucacgugcugguggcugacuaccaucaguacugaccugaccuuuagcgugaaauccagccgcgggaguuccgauccccagggugucaccuguggcgcagccacguugagcgcagagagggugcgcggggacaacaaggaguacgaauauuccguggagugccaggaagauagugccuguccagcggccgaggaaagccuccccaucgaggucaugguggacgcaguacacaaacugaaguacgagaauuauacuuccagcuucuuuauucgggacaucauuaagccagauccgcccaaaaaccugcagcucaagccacugaaaaauaguaggcaaguggaagucuccugggaguaccccgacaccuggagcacuccacauaguuacuucuccuugaccuuuugcguccaggugcagggcaagagcaaacgggaaaagaaggaucgcguguucaccgacaaaacuagcgccacggugaucuguaggaagaacgccuccauuaguguacgggcacaggaucgcuauuacagcuccagcuggagugagugggccuccgugcccugcagcugaggacuagugcaucacauuuaaaagcaucucagccuaccaugagaauaagagaaagaaaaugaagaucaauagcuuauucaucucuuuuucuuuuucguugguguaaagccaacacccugucuaaaaaacauaaauuucuuuaaucauuuugccucuuuucucugugcuucaauuaauaaaaaauggaaagaaccuagaucuaaaaaaaaaaaaaaaaaaaaaaaaaaaaaaaaaaaaaaaaaaaaaaaaaaaaaaaaaaaaaaaaugcaucccccccccccccccccccccccccccccccaaaggcucuuuucagagccaccagaauu

SEQ ID NO: 372 - RNA, 436 nt, Artificial Sequence
  Linker-sFvCC49-218 mRNA product TOP UTR opt7
ggggcgcugccuacggagguggcagccaucuccuucucggcaucaagcuuaccggcagcaccuccgggagugguaagcccggcagcggggagggcuccacuaaagguggacuagugcaucacauuuaaaagcaucucagccuaccaugagaauaagagaaagaaaaugaagaucaauagcuuauucaucucuuuuucuuuuucguugguguaaagccaacacccugucuaaaaaacauaaauuucuuuaaucauuuugccucuuuucucugugcuucaauuaauaaaaaauggaaagaaccuagaucuaaaaaaaaaaaaaaaaaaaaaaaaaaaaaaaaaaaaaaaaaaaaaaaaaaaaaaaaaaaaaaaaugcaucccccccccccccccccccccccccccccccaaaggcucuuuucagagccaccagaauu

SEQ ID NO: 373 - RNA, 2014 nt, Artificial Sequence
  IL12 mRNA product TOP UTR opt7
ggggcgcugccuacggagguggcagccaucuccuucucggcaucaagcuuaccaugugccaccagcaacuggugaucagcugguucucccucgucuuucuggccagucccuugguggcaauuugggagcugaagaaagacguauacguggucgaacucgauugguauccagacgccccgggcgagaugguggugcugaccugugauacucccgaagaggacgggaucaccuggacguuggaucagagcuccgaaguccuggguaguggcaagacucucaccauucaggugaaagaguucggggacgcgggccaguauaccugccauaaggguggggagguacugagccacucccugcuccuguugcauaaaaaggaagauggcaucuggagcacugacauucugaaggaucaaaaagagccaaagaacaaaaccuuucucaggugugaagccaagaauuacuccggccgguucacgugcugguggcugacuaccaucaguacugaccugaccuuuagcgugaaauccagccgcgggaguuccgauccccagggugucaccuguggcgcagccacguugagcgcagagagggugcgcggggacaacaaggaguacgaauauuccguggagugccaggaagauagugccuguccagcggccgaggaaagccuccccaucgaggucaugguggacgcaguacacaaacugaaguacgagaauuauacuuccagcuucuuuauucgggacaucauuaagccagauccgcccaaaaaccugcagcucaagccacugaaaaauaguaggcaaguggaagucuccugggaguaccccgacaccuggagcacuccacauaguuacuucuccuugaccuuuugcguccaggugcagggcaagagcaaacgggaaaagaaggaucgcguguucaccgacaaaacuagcgccacggugaucuguaggaagaacgccuccauuaguguacgggcacaggaucgcuauuacagcuccagcuggagugagugggccuccgugcccugcagcggcagcaccuccgggagugguaagcccggcagcggggagggcuccacuaaaggucggaaccugccaguggcgacuccggaucccggcauguucccaugucuccaucacagucagaaucugcugcgcgccguaagcaacaugcuccaaaaggcaaggcagacccuggaguuuuaccccugcacguccgaagagaucgaccaugaagauauuacuaaagacaagaccaguaccguggaggccuguuugccacuggaacucacuaaaaaugagagcugccugaacucccgggagaccagcuucaucacgaauggguccugucuggcaagucgcaagacuagcuuuaugauggccuugugccucuccagcauuuaugaagaucugaaaauguaccaggucgaguucaagaccaugaacgcgaagcugcucauggaccccaaaaggcagaucuuucuggaucaaaauauguuggccgugauugacgaacugaugcaggcacucaacuucaauagugagacugugccacagaaguccagccuggaggaaccggauuuuuauaaaaccaagaucaaacuguguaucuugcuccacgccuuccggauucgcgccgucaccaucgacagggugauguccuaccugaacgcaaguugaggacuagugcaucacauuuaaaagcaucucagccuaccaugagaauaagagaaagaaaaugaagaucaauagcuuauucaucucuuuuucuuuuucguugguguaaagccaacacccugucuaaaaaacauaaauuucuuuaaucauuuugccucuuuucucugugcuucaauuaauaaaaaauggaaagaaccuagaucuaaaaaaaaaaaaaaaaaaaaaaaaaaaaaaaaaaaaaaaaaaaaaaaaaaaaaaaaaaaaaaaaugcaucccccccccccccccccccccccccccccccaaaggcucuuuucagagccaccagaauu

SEQ ID NO: 374 - RNA, 1168 nt, Artificial Sequence
  CD40LG mRNA product TOP UTR opt7
ggggcgcugccuacggagguggcagccaucuccuucucggcaucaagcuuaccaugaucgagaccuacaaccagacuagccccagguccgccgcaaccggccugccaauuaguaugaagaucuucauguaucuccugacgguguuuuugauuacucaaaugaucgggagcgcccuguucgcggucuaccuccaccggcgccuggacaaaauugaagaugagaggaauuugcaugaagacuuuguguucaugaagaccauccagcggugcaacaccggugagcgcucccugagucuccugaauugugaagagaucaaaagccaguuugagggcuucguaaaggauauuaugcugaacaaagaagagacuaagaaggaaaauuccuuugagaugcagaaaggggaccaaaacccgcagaucgccgcacacgugauuagcgaggccuccaguaagaccacgagcguccuccagugggcagaaaaaggcuauuacacuauguccaauaaccuggugaccuuggagaaugguaagcagcugacugugaaaaggcaagggcucuauuacaucuaugcccaggucaccuucugcagcaaccgggaagcgaguucccaggcccccuuuauugcaagccugugucugaaguccccaggccgcuucgagaggaucuugcuccgggccgccaauacccauaguagcgcaaaacccugcggccagcaauccauucaccucggggguguguuugaacugcagccaggcgccagcguauucgugaacgucacggaucccagucaggugucccaugggacuggcuucaccagcuuuggucugcugaaguugugaggacuagugcaucacauuuaaaagcaucucagccuaccaugagaauaagagaaagaaaaugaagaucaauagcuuauucaucucuuuuucuuuuucguugguguaaagccaacacccugucuaaaaaacauaaauuucuuuaaucauuuugccucuuuucucugugcuucaauuaauaaaaaauggaaagaaccuagaucuaaaaaaaaaaaaaaaaaaaaaaaaaaaaaaaaaaaaaaaaaaaaaaaaaaaaaaaaaaaaaaaaugcaucccccccccccccccccccccccccccccccaaaggcucuuuucagagccaccagaauu

SEQ ID NO: 375 - RNA, 1249 nt, Artificial Sequence
  PDCD1 mRNA product TOP UTR opt8
ggggcgcugccuacggagguggcagccaucuccuucucggcaucaagcuuaccaugcaaaucccacaagcccccuggcccguagucugggccguacuacaacuaggcuggagacccggcugguuucucgacagccccgaccgacccuggaacccccccaccuucucacccgcccuccucgucgucaccgaaggcgacaacgccacauucacaugcuccuucuccaacaccucugaaucauucguccuaaacugguaccgaaugucacccuccaaccaaacugacaaacucgccgccuuucccgaagaccgcucccaacccggccaagacugccgauuccgagucacacaacuuccuaacggcagagacuuccacauguccguaguccgagcccgccgaaacgacuccggaaccuaccucugcggagccaucucccucgcccccaaagcccaaaucaaagaaucccuccgagcagaacuccgcgucaccgaacgccgcgccgaaguccccaccgcacacccaucacccuccccccgccccgccggccaauuccaaacacuuguaguaggcgucgucggcggccuccuuggaucacucguccuacuuguauggguccuagccgucaucugcucucgcgccgcacgcggcaccaucggcgcacgacgaaccggccaaccucuaaaagaagaccccuccgcaguccccgucuucuccgucgacuacggcgaacucgacuuccaauggcgcgaaaaaacccccgaacccccaguccccugcguacccgaacaaaccgaauacgcaacaaucguauuccccucaggaaugggcaccucaucccccgcccgacgaggaucagccgacggcccacgauccgcccaaccccuccgaccagaagacggccacugcucauggccccuuuaaggacuagugcaucacauuuaaaagcaucucagccuaccaugagaauaagagaaagaaaaugaagaucaauagcuuauucaucucuuuuucuuuuucguugguguaaagccaacacccugucuaaaaaacauaaauuucuuuaaucauuuugccucuuuucucugugcuucaauuaauaaaaaauggaaagaaccuagaucuaaaaaaaaaaaaaaaaaaaaaaaaaaaaaaaaaaaaaaaaaaaaaaaaaaaaaaaaaaaaaaaaugcaucccccccccccccccccccccccccccccccaaaggcucuuuucagagccaccagaauu

SEQ ID NO: 376 - RNA, 832 nt, Artificial Sequence
  PDCD1(1-149) mRNA product TOP UTR opt8
ggggcgcugccuacggagguggcagccaucuccuucucggcaucaagcuuaccaugcaaaucccacaagcccccuggcccguagucugggccguacuacaacuaggcuggagacccggcugguuucucgacagccccgaccgacccuggaacccccccaccuucucacccgcccuccucgucgucaccgaaggcgacaacgccacauucacaugcuccuucuccaacaccucugaaucauucguccuaaacugguaccgaaugucacccuccaaccaaacugacaaacucgccgccuuucccgaagaccgcucccaacccggccaagacugccgauuccgagucacacaacuuccuaacggcagagacuuccacauguccguaguccgagcccgccgaaacgacuccggaaccuaccucugcggagccaucucccucgcccccaaagcccaaaucaaagaaucccuccgagcagaacuccgcgucaccgaacgccgcgccuaaggacuagugcaucacauuuaaaagcaucucagccuaccaugagaauaagagaaagaaaaugaagaucaauagcuuauucaucucuuuuucuuuuucguugguguaaagccaacacccugucuaaaaaacauaaauuucuuuaaucauuuugccucuuuucucugugcuucaauuaauaaaaaauggaaagaaccuagaucuaaaaaaaaaaaaaaaaaaaaaaaaaaaaaaaaaaaaaaaaaaaaaaaaaaaaaaaaaaaaaaaaugcaucccccccccccccccccccccccccccccccaaaggcucuuuucagagccaccagaauu

SEQ ID NO: 377 - RNA, 1042 nt, Artificial Sequence
  IL12A mRNA product TOP UTR opt8
ggggcgcugccuacggagguggcagccaucuccuucucggcaucaagcuuaccaugugccccgccagaucccuccuacucgucgcaacacuuguccuccucgaccaccucucccucgcccgcaaucuccccgucgccacccccgaccccggaauguuucccugccuccaccacucacaaaaccuccuacgcgccgucucaaacaugcuucaaaaagcccgacaaacccucgaauuuuaccccugcaccuccgaagaaaucgaccacgaagacauaaccaaagacaaaaccuccaccgucgaagccugccuaccauuagaacuaaccaaaaacgaauccugccucaacucacgcgaaaccuccuucaucacaaacggcucaugccucgccucacgcaaaaccuccuucaugauggcccucugccuaucaucaaucuaugaagaccucaaaauguaccaaguagaauuuaaaaccaugaacgccaaacuccucauggaccccaaacgccaaaucuuccucgaccaaaacaugcucgcagucaucgacgaacucaugcaagcccucaacuucaacucagaaacagucccacaaaaauccucccucgaagaacccgacuucuauaaaaccaaaaucaaacucugcauccuccuccacgccuuccgcauacgcgccguaaccaucgaccgcguaaugucauaccuaaaugccucuuaaggacuagugcaucacauuuaaaagcaucucagccuaccaugagaauaagagaaagaaaaugaagaucaauagcuuauucaucucuuuuucuuuuucguugguguaaagccaacacccugucuaaaaaacauaaauuucuuuaaucauuuugccucuuuucucugugcuucaauuaauaaaaaauggaaagaaccuagaucuaaaaaaaaaaaaaaaaaaaaaaaaaaaaaaaaaaaaaaaaaaaaaaaaaaaaaaaaaaaaaaaaugcaucccccccccccccccccccccccccccccccaaaggcucuuuucagagccaccagaauu

SEQ ID NO: 378 - RNA, 1039 nt, Artificial Sequence
  IL12A(1-219) mRNA product TOP UTR opt8
ggggcgcugccuacggagguggcagccaucuccuucucggcaucaagcuuaccaugugccccgccagaucccuccuacucgucgcaacacuuguccuccucgaccaccucucccucgcccgcaaucuccccgucgccacccccgaccccggaauguuucccugccuccaccacucacaaaaccuccuacgcgccgucucaaacaugcuucaaaaagcccgacaaacccucgaauuuuaccccugcaccuccgaagaaaucgaccacgaagacauaaccaaagacaaaaccuccaccgucgaagccugccuaccauuagaacuaaccaaaaacgaauccugccucaacucacgcgaaaccuccuucaucacaaacggcucaugccucgccucacgcaaaaccuccuucaugauggcccucugccuaucaucaaucuaugaagaccucaaaauguaccaaguagaauuuaaaaccaugaacgccaaacuccucauggaccccaaacgccaaaucuuccucgaccaaaacaugcucgcagucaucgacgaacucaugcaagcccucaacuucaacucagaaacagucccacaaaaauccucccucgaagaacccgacuucuauaaaaccaaaaucaaacucugcauccuccuccacgccuuccgcauacgcgccguaaccaucgaccgcguaaugucauaccuaaaugccucuggacuagugcaucacauuuaaaagcaucucagccuaccaugagaauaagagaaagaaaaugaagaucaauagcuuauucaucucuuuuucuuuuucguugguguaaagccaacacccugucuaaaaaacauaaauuucuuuaaucauuuugccucuuuucucugugcuucaauuaauaaaaaauggaaagaaccuagaucuaaaaaaaaaaaaaaaaaaaaaaaaaaaaaaaaaaaaaaaaaaaaaaaaaaaaaaaaaaaaaaaaugcaucccccccccccccccccccccccccccccccaaaggcucuuuucagagccaccagaauu

SEQ ID NO: 379 - RNA, 976 nt, Artificial Sequence
  IL12A(23-219) mRNA product TOP UTR opt8
ggggcgcugccuacggagguggcagccaucuccuucucggcaucaagcuuacccgcaaucuccccgucgccacccccgaccccggaauguuucccugccuccaccacucacaaaaccuccuacgcgccgucucaaacaugcuucaaaaagcccgacaaacccucgaauuuuaccccugcaccuccgaagaaaucgaccacgaagacauaaccaaagacaaaaccuccaccgucgaagccugccuaccauuagaacuaaccaaaaacgaauccugccucaacucacgcgaaaccuccuucaucacaaacggcucaugccucgccucacgcaaaaccuccuucaugauggcccucugccuaucaucaaucuaugaagaccucaaaauguaccaaguagaauuuaaaaccaugaacgccaaacuccucauggaccccaaacgccaaaucuuccucgaccaaaacaugcucgcagucaucgacgaacucaugcaagcccucaacuucaacucagaaacagucccacaaaaauccucccucgaagaacccgacuucuauaaaaccaaaaucaaacucugcauccuccuccacgccuuccgcauacgcgccguaaccaucgaccgcguaaugucauaccuaaaugccucuuaaggacuagugcaucacauuuaaaagcaucucagccuaccaugagaauaagagaaagaaaaugaagaucaauagcuuauucaucucuuuuucuuuuucguugguguaaagccaacacccugucuaaaaaacauaaauuucuuuaaucauuuugccucuuuucucugugcuucaauuaauaaaaaauggaaagaaccuagaucuaaaaaaaaaaaaaaaaaaaaaaaaaaaaaaaaaaaaaaaaaaaaaaaaaaaaaaaaaaaaaaaaugcaucccccccccccccccccccccccccccccccaaaggcucuuuucagagccaccagaauu

SEQ ID NO: 380 - RNA, 1369 nt, Artificial Sequence
  IL12B mRNA product TOP UTR opt8
ggggcgcugccuacggagguggcagccaucuccuucucggcaucaagcuuaccaugugccaccaacaacucgucauaagcugguucagccuaguauuccucgccucaccccucgucgccaucugggaacucaagaaagacguauacgucgucgaacuagacugguaccccgacgcacccggagaaaugguaguacucacaugcgacacccccgaagaagacggcaucacauggaccuuagaccaaucaucagaaguccucggauccggaaaaacccucacaauccaagucaaagaguucggcgacgccggccaauacacaugccacaaaggcggagaaguccucucacacucacuccuucuacuacacaagaaagaagacggcaucugguccaccgacauacucaaagaccaaaaagaacccaaaaacaaaaccuuccuccgcugcgaagccaaaaacuacuccggccgauucacaugcugguggcucaccaccaucuccaccgaccugaccuucuccgucaaauccagcaggggcuccucagacccacaaggcguaaccugcggcgcagccacccuaucggccgaacgaguccgcggagacaacaaagaauacgaauacagcgucgaaugccaagaagacucagcaugcccagcagccgaagaaucacuccccaucgaagucauggucgacgccguccacaaacuaaaauacgaaaacuacacaagcucauucuucauccgcgacauaaucaaacccgacccaccgaaaaaccuccaacucaaaccccuuaaaaacagccgccaagucgaagucuccugggaauaccccgacaccugguccacaccccacuccuacuucucacucaccuucugcguccaaguccaaggcaaauccaaacgcgaaaagaaagaccgcguauucaccgacaaaaccuccgccacagucaucugccgcaaaaacgccucaaucuccguccgcgcccaagaccgauacuacagcuccuccuggucagaaugggccuccgucccaugcuccuaaggacuagugcaucacauuuaaaagcaucucagccuaccaugagaauaagagaaagaaaaugaagaucaauagcuuauucaucucuuuuucuuuuucguugguguaaagccaacacccugucuaaaaaacauaaauuucuuuaaucauuuugccucuuuucucugugcuucaauuaauaaaaaauggaaagaaccuagaucuaaaaaaaaaaaaaaaaaaaaaaaaaaaaaaaaaaaaaaaaaaaaaaaaaaaaaaaaaaaaaaaaugcaucccccccccccccccccccccccccccccccaaaggcucuuuucagagccaccagaauu

SEQ ID NO: 381 - RNA, 1366 nt, Artificial Sequence
  IL12B(1-328) mRNA product TOP UTR opt8
ggggcgcugccuacggagguggcagccaucuccuucucggcaucaagcuuaccaugugccaccaacaacucgucauaagcugguucagccuaguauuccucgccucaccccucgucgccaucugggaacucaagaaagacguauacgucgucgaacuagacugguaccccgacgcacccggagaaaugguaguacucacaugcgacacccccgaagaagacggcaucacauggaccuuagaccaaucaucagaaguccucggauccggaaaaacccucacaauccaagucaaagaguucggcgacgccggccaauacacaugccacaaaggcggagaaguccucucacacucacuccuucuacuacacaagaaagaagacggcaucugguccaccgacauacucaaagaccaaaaagaacccaaaaacaaaaccuuccuccgcugcgaagccaaaaacuacuccggccgauucacaugcugguggcucaccaccaucuccaccgaccugaccuucuccgucaaauccagcaggggcuccucagacccacaaggcguaaccugcggcgcagccacccuaucggccgaacgaguccgcggagacaacaaagaauacgaauacagcgucgaaugccaagaagacucagcaugcccagcagccgaagaaucacuccccaucgaagucauggucgacgccguccacaaacuaaaauacgaaaacuacacaagcucauucuucauccgcgacauaaucaaacccgacccaccgaaaaaccuccaacucaaaccccuuaaaaacagccgccaagucgaagucuccugggaauaccccgacaccugguccacaccccacuccuacuucucacucaccuucugcguccaaguccaaggcaaauccaaacgcgaaaagaaagaccgcguauucaccgacaaaaccuccgccacagucaucugccgcaaaaacgccucaaucuccguccgcgcccaagaccgauacuacagcuccuccuggucagaaugggccuccgucccaugcuccggacuagugcaucacauuuaaaagcaucucagccuaccaugagaauaagagaaagaaaaugaagaucaauagcuuauucaucucuuuuucuuuuucguugguguaaagccaacacccugucuaaaaaacauaaauuucuuuaaucauuuugccucuuuucucugugcuucaauuaauaaaaaauggaaagaaccuagaucuaaaaaaaaaaaaaaaaaaaaaaaaaaaaaaaaaaaaaaaaaaaaaaaaaaaaaaaaaaaaaaaaugcaucccccccccccccccccccccccccccccccaaaggcucuuuucagagccaccagaauu

SEQ ID NO: 382 - RNA, 1303 nt, Artificial Sequence
  IL12B(23-328) mRNA product TOP UTR opt8
ggggcgcugccuacggagguggcagccaucuccuucucggcaucaagcuuaccaucugggaacucaagaaagacguauacgucgucgaacuagacugguaccccgacgcacccggagaaaugguaguacucacaugcgacacccccgaagaagacggcaucacauggaccuuagaccaaucaucagaaguccucggauccggaaaaacccucacaauccaagucaaagaguucggcgacgccggccaauacacaugccacaaaggcggagaaguccucucacacucacuccuucuacuacacaagaaagaagacggcaucugguccaccgacauacucaaagaccaaaaagaacccaaaaacaaaaccuuccuccgcugcgaagccaaaaacuacuccggccgauucacaugcugguggcucaccaccaucuccaccgaccugaccuucuccgucaaauccagcaggggcuccucagacccacaaggcguaaccugcggcgcagccacccuaucggccgaacgaguccgcggagacaacaaagaauacgaauacagcgucgaaugccaagaagacucagcaugcccagcagccgaagaaucacuccccaucgaagucauggucgacgccguccacaaacuaaaauacgaaaacuacacaagcucauucuucauccgcgacauaaucaaacccgacccaccgaaaaaccuccaacucaaaccccuuaaaaacagccgccaagucgaagucuccugggaauaccccgacaccugguccacaccccacuccuacuucucacucaccuucugcguccaaguccaaggcaaauccaaacgcgaaaagaaagaccgcguauucaccgacaaaaccuccgccacagucaucugccgcaaaaacgccucaaucuccguccgcgcccaagaccgauacuacagcuccuccuggucagaaugggccuccgucccaugcuccuaaggacuagugcaucacauuuaaaagcaucucagccuaccaugagaauaagagaaagaaaaugaagaucaauagcuuauucaucucuuuuucuuuuucguugguguaaagccaacacccugucuaaaaaacauaaauuucuuuaaucauuuugccucuuuucucugugcuucaauuaauaaaaaauggaaagaaccuagaucuaaaaaaaaaaaaaaaaaaaaaaaaaaaaaaaaaaaaaaaaaaaaaaaaaaaaaaaaaaaaaaaaugcaucccccccccccccccccccccccccccccccaaaggcucuuuucagagccaccagaauu

SEQ ID NO: 383 - RNA, 436 nt, Artificial Sequence
  Linker-sFvCC49-218 mRNA product TOP UTR opt8
ggggcgcugccuacggagguggcagccaucuccuucucggcaucaagcuuaccgggagcacgagcgggagcgggaagccgggaaguggagagggaaguacaaagggaggacuagugcaucacauuuaaaagcaucucagccuaccaugagaauaagagaaagaaaaugaagaucaauagcuuauucaucucuuuuucuuuuucguugguguaaagccaacacccugucuaaaaaacauaaauuucuuuaaucauuuugccucuuuucucugugcuucaauuaauaaaaaauggaaagaaccuagaucuaaaaaaaaaaaaaaaaaaaaaaaaaaaaaaaaaaaaaaaaaaaaaaaaaaaaaaaaaaaaaaaaugcaucccccccccccccccccccccccccccccccaaaggcucuuuucagagccaccagaauu

SEQ ID NO: 384 - RNA, 2014 nt, Artificial Sequence
  IL12 mRNA product TOP UTR opt8
ggggcgcugccuacggagguggcagccaucuccuucucggcaucaagcuuaccaugugccaccaacaacucgucauaagcugguucagccuaguauuccucgccucaccccucgucgccaucugggaacucaagaaagacguauacgucgucgaacuagacugguaccccgacgcacccggagaaaugguaguacucacaugcgacacccccgaagaagacggcaucacauggaccuuagaccaaucaucagaaguccucggauccggaaaaacccucacaauccaagucaaagaguucggcgacgccggccaauacacaugccacaaaggcggagaaguccucucacacucacuccuucuacuacacaagaaagaagacggcaucugguccaccgacauacucaaagaccaaaaagaacccaaaaacaaaaccuuccuccgcugcgaagccaaaaacuacuccggccgauucacaugcugguggcucaccaccaucuccaccgaccugaccuucuccgucaaauccagcaggggcuccucagacccacaaggcguaaccugcggcgcagccacccuaucggccgaacgaguccgcggagacaacaaagaauacgaauacagcgucgaaugccaagaagacucagcaugcccagcagccgaagaaucacuccccaucgaagucauggucgacgccguccacaaacuaaaauacgaaaacuacacaagcucauucuucauccgcgacauaaucaaacccgacccaccgaaaaaccuccaacucaaaccccuuaaaaacagccgccaagucgaagucuccugggaauaccccgacaccugguccacaccccacuccuacuucucacucaccuucugcguccaaguccaaggcaaauccaaacgcgaaaagaaagaccgcguauucaccgacaaaaccuccgccacagucaucugccgcaaaaacgccucaaucuccguccgcgcccaagaccgauacuacagcuccuccuggucagaaugggccuccgucccaugcuccgggagcacgagcgggagcgggaagccgggaaguggagagggaaguacaaagggacgcaaucuccccgucgccacccccgaccccggaauguuucccugccuccaccacucacaaaaccuccuacgcgccgucucaaacaugcuucaaaaagcccgacaaacccucgaauuuuaccccugcaccuccgaagaaaucgaccacgaagacauaaccaaagacaaaaccuccaccgucgaagccugccuaccauuagaacuaaccaaaaacgaauccugccucaacucacgcgaaaccuccuucaucacaaacggcucaugccucgccucacgcaaaaccuccuucaugauggcccucugccuaucaucaaucuaugaagaccucaaaauguaccaaguagaauuuaaaaccaugaacgccaaacuccucauggaccccaaacgccaaaucuuccucgaccaaaacaugcucgcagucaucgacgaacucaugcaagcccucaacuucaacucagaaacagucccacaaaaauccucccucgaagaacccgacuucuauaaaaccaaaaucaaacucugcauccuccuccacgccuuccgcauacgcgccguaaccaucgaccgcguaaugucauaccuaaaugccucuuaaggacuagugcaucacauuuaaaagcaucucagccuaccaugagaauaagagaaagaaaaugaagaucaauagcuuauucaucucuuuuucuuuuucguugguguaaagccaacacccugucuaaaaaacauaaauuucuuuaaucauuuugccucuuuucucugugcuucaauuaauaaaaaauggaaagaaccuagaucuaaaaaaaaaaaaaaaaaaaaaaaaaaaaaaaaaaaaaaaaaaaaaaaaaaaaaaaaaaaaaaaaugcaucccccccccccccccccccccccccccccccaaaggcucuuuucagagccaccagaauu

SEQ ID NO: 385 - RNA, 1168 nt, Artificial Sequence
  CD40LG mRNA product TOP UTR opt8
ggggcgcugccuacggagguggcagccaucuccuucucggcaucaagcuuaccaugauagaaaccuacaaccaaaccucuccccgauccgcagccaccggccuccccaucuccaugaaaaucuucauguaccuccuaaccgucuuccuaaucacucaaaugaucggcuccgcucucuucgcagucuaccuccaccgccgccuagacaaaaucgaagacgaacgcaaccuacacgaagacuucgucuucaugaaaaccauucaacgcugcaacacaggcgaacgaucccuaucccuacucaacugcgaagaaaucaaaucccaauucgaaggcuuuguaaaagacaucaugcucaacaaagaagaaaccaaaaaagaaaacuccuucgaaaugcaaaaaggcgaccaaaacccccaaauagccgcccaugucauaucagaagccuccuccaaaaccaccuccguccuccaaugggccgaaaaaggcuacuacaccauguccaacaaccuaguaacccuugaaaacggcaaacaacucaccguaaaacgccaaggccucuacuacaucuacgcccaagucaccuucugcuccaacagagaagcauccucccaagcacccuucaucgccucccuaugccucaaaucccccggccgcuucgaacgaauccuccuccgcgccgccaacacucacuccucagccaaacccugcggccaacaaaguauacaccuuggcggagucuucgaacuccaacccggcgccuccgucuucguaaacgucaccgaccccucacaagucucccacggaaccggauucaccuccuucggccuacuaaaacuauagggacuagugcaucacauuuaaaagcaucucagccuaccaugagaauaagagaaagaaaaugaagaucaauagcuuauucaucucuuuuucuuuuucguugguguaaagccaacacccugucuaaaaaacauaaauuucuuuaaucauuuugccucuuuucucugugcuucaauuaauaaaaaauggaaagaaccuagaucuaaaaaaaaaaaaaaaaaaaaaaaaaaaaaaaaaaaaaaaaaaaaaaaaaaaaaaaaaaaaaaaaugcaucccccccccccccccccccccccccccccccaaaggcucuuuucagagccaccagaauu

SEQ ID NO: 386 - RNA, 1249 nt, Artificial Sequence
  PDCD1 mRNA product TOP UTR opt9
ggggcgcugccuacggagguggcagccaucuccuucucggcaucaagcuuaccaugcaaaucccccaagccccauggcccgucgucugggccguccuccaacucggcuggcgccccggaugguuccuagacucuccagaccgccccuggaauccacccaccuucucccccgcccuccuagucgucaccgaaggcgacaacgccaccuucaccuguucauucuccaacaccucagaauccuucguacucaacugguaccgcauguccccaagcaaccaaacagacaaacucgccgccuuccccgaagaccgcucccaacccggucaagacugccgauuccgcgucacccaacuccccaacggacgcgacuuccacauguccgucguucgagcacgacgcaacgacucaggcacauaccuaugcggagccaucucccuagcccccaaagcccaaaucaaagaaucacuacgcgccgaacuccgcgucaccgaacgccgcgccgaaguacccacagcccacccauccccaucaccacgcccagcaggucaauuccaaaccuuagucgucggagucgucggcggccuccuaggcucacucguccuccuagucuggguccucgccgucauaugcagccgcgccgcacgcggcaccaucggcgccagacgcaccggacaaccccucaaagaagaccccucagccguccccgucuuuuccgucgacuacggcgaacuagacuuccaauggcgcgaaaaaacccccgaaccccccgucccaugcguacccgaacaaaccgaauacgccacaauagucuucccauccggcaugggaaccucaucacccgccagacgaggcucagcagauggcccccgcuccgcacaaccacuccgaccagaagacggccacugcagcuggccccuguaaggacuagugcaucacauuuaaaagcaucucagccuaccaugagaauaagagaaagaaaaugaagaucaauagcuuauucaucucuuuuucuuuuucguugguguaaagccaacacccugucuaaaaaacauaaauuucuuuaaucauuuugccucuuuucucugugcuucaauuaauaaaaaauggaaagaaccuagaucuaaaaaaaaaaaaaaaaaaaaaaaaaaaaaaaaaaaaaaaaaaaaaaaaaaaaaaaaaaaaaaaaugcaucccccccccccccccccccccccccccccccaaaggcucuuuucagagccaccagaauu

SEQ ID NO: 387 - RNA, 832 nt, Artificial Sequence
  PDCD1(1-149) mRNA product TOP UTR opt9
ggggcgcugccuacggagguggcagccaucuccuucucggcaucaagcuuaccaugcaaaucccccaagccccauggcccgucgucugggccguccuccaacucggcuggcgccccggaugguuccuagacucuccagaccgccccuggaauccacccaccuucucccccgcccuccuagucgucaccgaaggcgacaacgccaccuucaccuguucauucuccaacaccucagaauccuucguacucaacugguaccgcauguccccaagcaaccaaacagacaaacucgccgccuuccccgaagaccgcucccaacccggucaagacugccgauuccgcgucacccaacuccccaacggacgcgacuuccacauguccgucguucgagcacgacgcaacgacucaggcacauaccuaugcggagccaucucccuagcccccaaagcccaaaucaaagaaucacuacgcgccgaacuccgcgucaccgaacgccgcgccuaaggacuagugcaucacauuuaaaagcaucucagccuaccaugagaauaagagaaagaaaaugaagaucaauagcuuauucaucucuuuuucuuuuucguugguguaaagccaacacccugucuaaaaaacauaaauuucuuuaaucauuuugccucuuuucucugugcuucaauuaauaaaaaauggaaagaaccuagaucuaaaaaaaaaaaaaaaaaaaaaaaaaaaaaaaaaaaaaaaaaaaaaaaaaaaaaaaaaaaaaaaaugcaucccccccccccccccccccccccccccccccaaaggcucuuuucagagccaccagaauu

SEQ ID NO: 388 - RNA, 1042 nt, Artificial Sequence
  IL12A mRNA product TOP UTR opt9
ggggcgcugccuacggagguggcagccaucuccuucucggcaucaagcuuaccaugugccccgccagaucccuccuccucgucgcaacccucguccuccucgaccaccucucccuagcacguaaccucccagucgccaccccagaccccggaauguuccccugccuccaucacucccaaaaucuccuccgugccgucuccaacaugcuccaaaaagcccgccaaacccucgaauuuuauccaugcaccuccgaagaaauagaccaugaagacaucaccaaagacaaaacauccaccgucgaagccugccucccccucgaacucacaaaaaacgaaucaugccucaacucccgcgaaaccuccuucauaaccaacggcucaugccucgccucucgcaaaaccucauucaugauggcccucugccuauccucuaucuacgaagaccucaaaauguaccaagucgaauuuaaaaccaugaacgccaaacuccucauggaccccaaacgccaaaucuuccucgaccaaaacaugcucgcagucaucgacgaacucaugcaagcacucaacuucaacucagaaaccgucccccaaaaauccucccucgaagaacccgacuucuacaaaacaaaaauaaaacucugcauccuccuccacgccuuccgcauccgagcagucaccaucgaucgcgucauguccuaccuaaacgccuccuaaggacuagugcaucacauuuaaaagcaucucagccuaccaugagaauaagagaaagaaaaugaagaucaauagcuuauucaucucuuuuucuuuuucguugguguaaagccaacacccugucuaaaaaacauaaauuucuuuaaucauuuugccucuuuucucugugcuucaauuaauaaaaaauggaaagaaccuagaucuaaaaaaaaaaaaaaaaaaaaaaaaaaaaaaaaaaaaaaaaaaaaaaaaaaaaaaaaaaaaaaaaugcaucccccccccccccccccccccccccccccccaaaggcucuuuucagagccaccagaauu

SEQ ID NO: 389 - RNA, 1039 nt, Artificial Sequence
  IL12A(1-219) mRNA product TOP UTR opt9
ggggcgcugccuacggagguggcagccaucuccuucucggcaucaagcuuaccaugugccccgccagaucccuccuccucgucgcaacccucguccuccucgaccaccucucccuagcacguaaccucccagucgccaccccagaccccggaauguuccccugccuccaucacucccaaaaucuccuccgugccgucuccaacaugcuccaaaaagcccgccaaacccucgaauuuuauccaugcaccuccgaagaaauagaccaugaagacaucaccaaagacaaaacauccaccgucgaagccugccucccccucgaacucacaaaaaacgaaucaugccucaacucccgcgaaaccuccuucauaaccaacggcucaugccucgccucucgcaaaaccucauucaugauggcccucugccuauccucuaucuacgaagaccucaaaauguaccaagucgaauuuaaaaccaugaacgccaaacuccucauggaccccaaacgccaaaucuuccucgaccaaaacaugcucgcagucaucgacgaacucaugcaagcacucaacuucaacucagaaaccgucccccaaaaauccucccucgaagaacccgacuucuacaaaacaaaaauaaaacucugcauccuccuccacgccuuccgcauccgagcagucaccaucgaucgcgucauguccuaccuaaacgccuccggacuagugcaucacauuuaaaagcaucucagccuaccaugagaauaagagaaagaaaaugaagaucaauagcuuauucaucucuuuuucuuuuucguugguguaaagccaacacccugucuaaaaaacauaaauuucuuuaaucauuuugccucuuuucucugugcuucaauuaauaaaaaauggaaagaaccuagaucuaaaaaaaaaaaaaaaaaaaaaaaaaaaaaaaaaaaaaaaaaaaaaaaaaaaaaaaaaaaaaaaaugcaucccccccccccccccccccccccccccccccaaaggcucuuuucagagccaccagaauu

SEQ ID NO: 390 - RNA, 976 nt, Artificial Sequence
  IL12A(23-219) mRNA product TOP UTR opt9
ggggcgcugccuacggagguggcagccaucuccuucucggcaucaagcuuacccguaaccucccagucgccaccccagaccccggaauguuccccugccuccaucacucccaaaaucuccuccgugccgucuccaacaugcuccaaaaagcccgccaaacccucgaauuuuauccaugcaccuccgaagaaauagaccaugaagacaucaccaaagacaaaacauccaccgucgaagccugccucccccucgaacucacaaaaaacgaaucaugccucaacucccgcgaaaccuccuucauaaccaacggcucaugccucgccucucgcaaaaccucauucaugauggcccucugccuauccucuaucuacgaagaccucaaaauguaccaagucgaauuuaaaaccaugaacgccaaacuccucauggaccccaaacgccaaaucuuccucgaccaaaacaugcucgcagucaucgacgaacucaugcaagcacucaacuucaacucagaaaccgucccccaaaaauccucccucgaagaacccgacuucuacaaaacaaaaauaaaacucugcauccuccuccacgccuuccgcauccgagcagucaccaucgaucgcgucauguccuaccuaaacgccuccuaaggacuagugcaucacauuuaaaagcaucucagccuaccaugagaauaagagaaagaaaaugaagaucaauagcuuauucaucucuuuuucuuuuucguugguguaaagccaacacccugucuaaaaaacauaaauuucuuuaaucauuuugccucuuuucucugugcuucaauuaauaaaaaauggaaagaaccuagaucuaaaaaaaaaaaaaaaaaaaaaaaaaaaaaaaaaaaaaaaaaaaaaaaaaaaaaaaaaaaaaaaaugcaucccccccccccccccccccccccccccccccaaaggcucuuuucagagccaccagaauu

SEQ ID NO: 391 - RNA, 1369 nt, Artificial Sequence
  IL12B mRNA product TOP UTR opt9
ggggcgcugccuacggagguggcagccaucuccuucucggcaucaagcuuaccaugugucaccaacaacuuguaaucagcugguucucccucgucuuccucgccucaccccucgucgccaucugggaacucaaaaaagacgucuacguagucgaacucgacugguaccccgacgccccaggagaaauggucguacucaccugugacacccccgaagaagacggcaucaccuggacccucgaccaauccuccgaaguccucgguucaggaaaaacccucaccauccaaguaaaagaauuuggcgacgccgggcaauauaccugccacaaaggcggcgagguccuaucccacucacuccuccuccuccacaagaaagaagacggaaucugguccaccgacauccuuaaagaccaaaaagaaccaaaaaacaaaacauuccuccgcugcgaagccaaaaacuacagcggccgcuucaccuguugguggcuaaccacaauaucaaccgacuuaaccuucagcgucaaauccuccagaggauccagcgacccacaaggaguuaccugcggagccgcaacacucagcgccgaacgaguccgcggagacaacaaagaauacgaauacuccgucgaaugccaagaagacucagcaugccccgccgcagaagaaucccuacccaucgaaguaaugguagacgccguccacaaacucaaauacgaaaacuacaccagcuccuucuucauccgagacaucaucaaacccgaccccccaaaaaaccuccaacuaaaaccccucaaaaacagccgccaaguagaaguauccugggaauaccccgacaccugguccacaccccacuccuacuucucgcucacguucugcguccaaguccaaggcaaauccaaacgagaaaaaaaagaccgcgucuucaccgacaaaacuuccgccaccgucaucugccgcaaaaacgccagcaucagcguccgcgcacaagaccgcuacuacucaagcuccugguccgaaugggccuccgucccaugcucauaaggacuagugcaucacauuuaaaagcaucucagccuaccaugagaauaagagaaagaaaaugaagaucaauagcuuauucaucucuuuuucuuuuucguugguguaaagccaacacccugucuaaaaaacauaaauuucuuuaaucauuuugccucuuuucucugugcuucaauuaauaaaaaauggaaagaaccuagaucuaaaaaaaaaaaaaaaaaaaaaaaaaaaaaaaaaaaaaaaaaaaaaaaaaaaaaaaaaaaaaaaaugcaucccccccccccccccccccccccccccccccaaaggcucuuuucagagccaccagaauu

SEQ ID NO: 392 - RNA, 1366 nt, Artificial Sequence
  IL12B(1-328) mRNA product TOP UTR opt9
ggggcgcugccuacggagguggcagccaucuccuucucggcaucaagcuuaccaugugucaccaacaacuuguaaucagcugguucucccucgucuuccucgccucaccccucgucgccaucugggaacucaaaaaagacgucuacguagucgaacucgacugguaccccgacgccccaggagaaauggucguacucaccugugacacccccgaagaagacggcaucaccuggacccucgaccaauccuccgaaguccucgguucaggaaaaacccucaccauccaaguaaaagaauuuggcgacgccgggcaauauaccugccacaaaggcggcgagguccuaucccacucacuccuccuccuccacaagaaagaagacggaaucugguccaccgacauccuuaaagaccaaaaagaaccaaaaaacaaaacauuccuccgcugcgaagccaaaaacuacagcggccgcuucaccuguugguggcuaaccacaauaucaaccgacuuaaccuucagcgucaaauccuccagaggauccagcgacccacaaggaguuaccugcggagccgcaacacucagcgccgaacgaguccgcggagacaacaaagaauacgaauacuccgucgaaugccaagaagacucagcaugccccgccgcagaagaaucccuacccaucgaaguaaugguagacgccguccacaaacucaaauacgaaaacuacaccagcuccuucuucauccgagacaucaucaaacccgaccccccaaaaaaccuccaacuaaaaccccucaaaaacagccgccaaguagaaguauccugggaauaccccgacaccugguccacaccccacuccuacuucucgcucacguucugcguccaaguccaaggcaaauccaaacgagaaaaaaaagaccgcgucuucaccgacaaaacuuccgccaccgucaucugccgcaaaaacgccagcaucagcguccgcgcacaagaccgcuacuacucaagcuccugguccgaaugggccuccgucccaugcucaggacuagugcaucacauuuaaaagcaucucagccuaccaugagaauaagagaaagaaaaugaagaucaauagcuuauucaucucuuuuucuuuuucguugguguaaagccaacacccugucuaaaaaacauaaauuucuuuaaucauuuugccucuuuucucugugcuucaauuaauaaaaaauggaaagaaccuagaucuaaaaaaaaaaaaaaaaaaaaaaaaaaaaaaaaaaaaaaaaaaaaaaaaaaaaaaaaaaaaaaaaugcaucccccccccccccccccccccccccccccccaaaggcucuuuucagagccaccagaauu

SEQ ID NO: 393 - RNA, 1303 nt, Artificial Sequence
  IL12B(23-328) mRNA product TOP UTR opt9
ggggcgcugccuacggagguggcagccaucuccuucucggcaucaagcuuaccaucugggaacucaaaaaagacgucuacguagucgaacucgacugguaccccgacgccccaggagaaauggucguacucaccugugacacccccgaagaagacggcaucaccuggacccucgaccaauccuccgaaguccucgguucaggaaaaacccucaccauccaaguaaaagaauuuggcgacgccgggcaauauaccugccacaaaggcggcgagguccuaucccacucacuccuccuccuccacaagaaagaagacggaaucugguccaccgacauccuuaaagaccaaaaagaaccaaaaaacaaaacauuccuccgcugcgaagccaaaaacuacagcggccgcuucaccuguugguggcuaaccacaauaucaaccgacuuaaccuucagcgucaaauccuccagaggauccagcgacccacaaggaguuaccugcggagccgcaacacucagcgccgaacgaguccgcggagacaacaaagaauacgaauacuccgucgaaugccaagaagacucagcaugccccgccgcagaagaaucccuacccaucgaaguaaugguagacgccguccacaaacucaaauacgaaaacuacaccagcuccuucuucauccgagacaucaucaaacccgaccccccaaaaaaccuccaacuaaaaccccucaaaaacagccgccaaguagaaguauccugggaauaccccgacaccugguccacaccccacuccuacuucucgcucacguucugcguccaaguccaaggcaaauccaaacgagaaaaaaaagaccgcgucuucaccgacaaaacuuccgccaccgucaucugccgcaaaaacgccagcaucagcguccgcgcacaagaccgcuacuacucaagcuccugguccgaaugggccuccgucccaugcucauaaggacuagugcaucacauuuaaaagcaucucagccuaccaugagaauaagagaaagaaaaugaagaucaauagcuuauucaucucuuuuucuuuuucguugguguaaagccaacacccugucuaaaaaacauaaauuucuuuaaucauuuugccucuuuucucugugcuucaauuaauaaaaaauggaaagaaccuagaucuaaaaaaaaaaaaaaaaaaaaaaaaaaaaaaaaaaaaaaaaaaaaaaaaaaaaaaaaaaaaaaaaugcaucccccccccccccccccccccccccccccccaaaggcucuuuucagagccaccagaauu

SEQ ID NO: 394 - RNA, 436 nt, Artificial Sequence
  Linker-sFvCC49-218 mRNA product TOP UTR opt9
ggggcgcugccuacggagguggcagccaucuccuucucggcaucaagcuuaccgggaguacgagugggagugggaagccggggaguggggaggggaguacgaaggggggacuagugcaucacauuuaaaagcaucucagccuaccaugagaauaagagaaagaaaaugaagaucaauagcuuauucaucucuuuuucuuuuucguugguguaaagccaacacccugucuaaaaaacauaaauuucuuuaaucauuuugccucuuuucucugugcuucaauuaauaaaaaauggaaagaaccuagaucuaaaaaaaaaaaaaaaaaaaaaaaaaaaaaaaaaaaaaaaaaaaaaaaaaaaaaaaaaaaaaaaaugcaucccccccccccccccccccccccccccccccaaaggcucuuuucagagccaccagaauu

SEQ ID NO: 395 - RNA, 2014 nt, Artificial Sequence
  IL12 mRNA product TOP UTR opt9
ggggcgcugccuacggagguggcagccaucuccuucucggcaucaagcuuaccaugugucaccaacaacuuguaaucagcugguucucccucgucuuccucgccucaccccucgucgccaucugggaacucaaaaaagacgucuacguagucgaacucgacugguaccccgacgccccaggagaaauggucguacucaccugugacacccccgaagaagacggcaucaccuggacccucgaccaauccuccgaaguccucgguucaggaaaaacccucaccauccaaguaaaagaauuuggcgacgccgggcaauauaccugccacaaaggcggcgagguccuaucccacucacuccuccuccuccacaagaaagaagacggaaucugguccaccgacauccuuaaagaccaaaaagaaccaaaaaacaaaacauuccuccgcugcgaagccaaaaacuacagcggccgcuucaccuguugguggcuaaccacaauaucaaccgacuuaaccuucagcgucaaauccuccagaggauccagcgacccacaaggaguuaccugcggagccgcaacacucagcgccgaacgaguccgcggagacaacaaagaauacgaauacuccgucgaaugccaagaagacucagcaugccccgccgcagaagaaucccuacccaucgaaguaaugguagacgccguccacaaacucaaauacgaaaacuacaccagcuccuucuucauccgagacaucaucaaacccgaccccccaaaaaaccuccaacuaaaaccccucaaaaacagccgccaaguagaaguauccugggaauaccccgacaccugguccacaccccacuccuacuucucgcucacguucugcguccaaguccaaggcaaauccaaacgagaaaaaaaagaccgcgucuucaccgacaaaacuuccgccaccgucaucugccgcaaaaacgccagcaucagcguccgcgcacaagaccgcuacuacucaagcuccugguccgaaugggccuccgucccaugcucagggaguacgagugggagugggaagccggggaguggggaggggaguacgaaggggcguaaccucccagucgccaccccagaccccggaauguuccccugccuccaucacucccaaaaucuccuccgugccgucuccaacaugcuccaaaaagcccgccaaacccucgaauuuuauccaugcaccuccgaagaaauagaccaugaagacaucaccaaagacaaaacauccaccgucgaagccugccucccccucgaacucacaaaaaacgaaucaugccucaacucccgcgaaaccuccuucauaaccaacggcucaugccucgccucucgcaaaaccucauucaugauggcccucugccuauccucuaucuacgaagaccucaaaauguaccaagucgaauuuaaaaccaugaacgccaaacuccucauggaccccaaacgccaaaucuuccucgaccaaaacaugcucgcagucaucgacgaacucaugcaagcacucaacuucaacucagaaaccgucccccaaaaauccucccucgaagaacccgacuucuacaaaacaaaaauaaaacucugcauccuccuccacgccuuccgcauccgagcagucaccaucgaucgcgucauguccuaccuaaacgccuccuaaggacuagugcaucacauuuaaaagcaucucagccuaccaugagaauaagagaaagaaaaugaagaucaauagcuuauucaucucuuuuucuuuuucguugguguaaagccaacacccugucuaaaaaacauaaauuucuuuaaucauuuugccucuuuucucugugcuucaauuaauaaaaaauggaaagaaccuagaucuaaaaaaaaaaaaaaaaaaaaaaaaaaaaaaaaaaaaaaaaaaaaaaaaaaaaaaaaaaaaaaaaugcaucccccccccccccccccccccccccccccccaaaggcucuuuucagagccaccagaauu

SEQ ID NO: 396 - RNA, 1168 nt, Artificial Sequence
  CD40LG mRNA product TOP UTR opt9
ggggcgcugccuacggagguggcagccaucuccuucucggcaucaagcuuaccaugaucgaaacauacaaccaaacauccccccgcuccgccgccacaggccuccccaucuccaugaaaaucuucauguaccuccucacaguauuccucaucacccaaaugaucggcuccgcacucuuugcagucuaucuccaccgucgccucgacaaaaucgaagacgaacgcaaccuccacgaagacuucgucuucaugaaaaccauacaacgcugcaacaccggcgaacgcucacucucccuacuaaacugcgaagaaaucaaaucccaauucgaaggcuucgucaaagacaucaugcuaaacaaagaagaaacaaaaaaagaaaacuccuucgaaaugcaaaaaggcgaccaaaacccccaaauagccgcccacgucaucuccgaagccuccuccaaaaccaccuccguccuccaaugggccgaaaaaggcuacuacacaauguccaacaaccucgucacccucgaaaacggcaaacaacucaccgucaaacgccaaggccucuacuacaucuacgcccaaguaaccuucugcuccaaccgcgaagccucaucucaagcucccuucaucgccucacucugccucaaaucacccggccgcuucgaaagaauccuccuccgcgccgcaaacacccacucauccgccaaacccugcggccaacaauccauacaccucggcggcguuuucgagcuccaaccuggcgccuccgucuucguaaacgucaccgaccccucacaagucucccacgguaccggcuucaccuccuucggacuccuaaaacucuaaggacuagugcaucacauuuaaaagcaucucagccuaccaugagaauaagagaaagaaaaugaagaucaauagcuuauucaucucuuuuucuuuuucguugguguaaagccaacacccugucuaaaaaacauaaauuucuuuaaucauuuugccucuuuucucugugcuucaauuaauaaaaaauggaaagaaccuagaucuaaaaaaaaaaaaaaaaaaaaaaaaaaaaaaaaaaaaaaaaaaaaaaaaaaaaaaaaaaaaaaaaugcaucccccccccccccccccccccccccccccccaaaggcucuuuucagagccaccagaauu

SEQ ID NO: 397 - RNA, 1249 nt, Artificial Sequence
  PDCD1 mRNA product TOP UTR opt10
ggggcgcugccuacggagguggcagccaucuccuucucggcaucaagcuuaccaugcaaaucccccaagcccccuggccggucgucugggccguccuccaacucggcuggcgccccggaugguuccucgacucccccgaccgcccguggaacccccccaccuucucccccgcccuccuagucgucaccgaaggcgacaacgccaccuucaccuguuccuucuccaacaccucagaauccuucguccucaacugguaccgcaugucccccuccaaccaaaccgacaaacucgccgccuuccccgaagaccgaucccaacccggccaagacugccgcuuccgcgucacacaacuucccaacggacgcgacuuucacauguccgucguccgcgcccgccgcaacgacuccggcaccuaccucugcggcgccaucucccucgcccccaaagcccaaaucaaagaaucccucagagccgaacuccgcgucaccgaacggcgcgccgaaguccccacugcccaccccucccccuccccccgccccgccggccaauuccaaacccucgucgucggcguugucggcggccuccucggcucacucguccuccucgucuggguacucgccgucaucugcucccgcgccgcgcgcggcaccaucggcgcgcgccgcaccggacaaccccuaaaagaagaccccuccgccguccccgucuucuccgucgacuacggcgaacucgacuuccaauggcgcgaaaaaaccccggaaccccccgucccgugcguccccgaacaaacagaauacgcgaccaucgucuucccguccggcaugggcacauccucacccgcccgccgaggcuccgccgacggcccccgauccgcccaaccccuacgccccgaagacggccacugcuccuggccccucuaaggacuagugcaucacauuuaaaagcaucucagccuaccaugagaauaagagaaagaaaaugaagaucaauagcuuauucaucucuuuuucuuuuucguugguguaaagccaacacccugucuaaaaaacauaaauuucuuuaaucauuuugccucuuuucucugugcuucaauuaauaaaaaauggaaagaaccuagaucuaaaaaaaaaaaaaaaaaaaaaaaaaaaaaaaaaaaaaaaaaaaaaaaaaaaaaaaaaaaaaaaaugcaucccccccccccccccccccccccccccccccaaaggcucuuuucagagccaccagaauu

SEQ ID NO: 398 - RNA, 832 nt, Artificial Sequence
  PDCD1(1-149) mRNA product TOP UTR opt10
ggggcgcugccuacggagguggcagccaucuccuucucggcaucaagcuuaccaugcaaaucccccaagcccccuggccggucgucugggccguccuccaacucggcuggcgccccggaugguuccucgacucccccgaccgcccguggaacccccccaccuucucccccgcccuccuagucgucaccgaaggcgacaacgccaccuucaccuguuccuucuccaacaccucagaauccuucguccucaacugguaccgcaugucccccuccaaccaaaccgacaaacucgccgccuuccccgaagaccgaucccaacccggccaagacugccgcuuccgcgucacacaacuucccaacggacgcgacuuucacauguccgucguccgcgcccgccgcaacgacuccggcaccuaccucugcggcgccaucucccucgcccccaaagcccaaaucaaagaaucccucagagccgaacuccgcgucaccgaacggcgcgccuaaggacuagugcaucacauuuaaaagcaucucagccuaccaugagaauaagagaaagaaaaugaagaucaauagcuuauucaucucuuuuucuuuuucguugguguaaagccaacacccugucuaaaaaacauaaauuucuuuaaucauuuugccucuuuucucugugcuucaauuaauaaaaaauggaaagaaccuagaucuaaaaaaaaaaaaaaaaaaaaaaaaaaaaaaaaaaaaaaaaaaaaaaaaaaaaaaaaaaaaaaaaugcaucccccccccccccccccccccccccccccccaaaggcucuuuucagagccaccagaauu

SEQ ID NO: 399 - RNA, 1042 nt, Artificial Sequence
  IL12A mRNA product TOP UTR opt10
ggggcgcugccuacggagguggcagccaucuccuucucggcaucaagcuuaccaugugccccgcccguucacuccuccucgucgccacccucguccuccuagaccaccucucccuggcccgcaaccucccagucgccacccccgaccccggcauguuccccugccuccaccacucccaaaaccuccuccgcgccgucuccaacaugcuccaaaaagcccgccaaacccucgaauuuuaccccugcaccuccgaagagaucgaccacgaagacaucaccaaagacaaaaccuccacagucgaagccugccucccccucgaacucaccaaaaacgaauccugccuuaacucccgcgaaaccuccuucaucaccaacggcuccugccucgccucccgcaaaaccuccuucaugauggcccucugccucuccuccaucuacgaagaccucaaaauguaccaagucgaauuuaaaaccaugaacgccaaacuccucauggaccccaaacgccaaaucuuccucgaccaaaacaugcucgccgucaucgacgaacucaugcaagcccucaacuucaacuccgaaaccgucccccaaaaauccucccucgaagaacccgacuucuacaaaaccaaaaucaaacuuugcauccuccuccacgcauuccgcauccgcgccgucaccaucgaccgugucaugagcuaccuaaacgccuccugaggacuagugcaucacauuuaaaagcaucucagccuaccaugagaauaagagaaagaaaaugaagaucaauagcuuauucaucucuuuuucuuuuucguugguguaaagccaacacccugucuaaaaaacauaaauuucuuuaaucauuuugccucuuuucucugugcuucaauuaauaaaaaauggaaagaaccuagaucuaaaaaaaaaaaaaaaaaaaaaaaaaaaaaaaaaaaaaaaaaaaaaaaaaaaaaaaaaaaaaaaaugcaucccccccccccccccccccccccccccccccaaaggcucuuuucagagccaccagaauu

SEQ ID NO: 400 - RNA, 1039 nt, Artificial Sequence
  IL12A(1-219) mRNA product TOP UTR opt10
ggggcgcugccuacggagguggcagccaucuccuucucggcaucaagcuuaccaugugccccgcccguucacuccuccucgucgccacccucguccuccuagaccaccucucccuggcccgcaaccucccagucgccacccccgaccccggcauguuccccugccuccaccacucccaaaaccuccuccgcgccgucuccaacaugcuccaaaaagcccgccaaacccucgaauuuuaccccugcaccuccgaagagaucgaccacgaagacaucaccaaagacaaaaccuccacagucgaagccugccucccccucgaacucaccaaaaacgaauccugccuuaacucccgcgaaaccuccuucaucaccaacggcuccugccucgccucccgcaaaaccuccuucaugauggcccucugccucuccuccaucuacgaagaccucaaaauguaccaagucgaauuuaaaaccaugaacgccaaacuccucauggaccccaaacgccaaaucuuccucgaccaaaacaugcucgccgucaucgacgaacucaugcaagcccucaacuucaacuccgaaaccgucccccaaaaauccucccucgaagaacccgacuucuacaaaaccaaaaucaaacuuugcauccuccuccacgcauuccgcauccgcgccgucaccaucgaccgugucaugagcuaccuaaacgccuccggacuagugcaucacauuuaaaagcaucucagccuaccaugagaauaagagaaagaaaaugaagaucaauagcuuauucaucucuuuuucuuuuucguugguguaaagccaacacccugucuaaaaaacauaaauuucuuuaaucauuuugccucuuuucucugugcuucaauuaauaaaaaauggaaagaaccuagaucuaaaaaaaaaaaaaaaaaaaaaaaaaaaaaaaaaaaaaaaaaaaaaaaaaaaaaaaaaaaaaaaaugcaucccccccccccccccccccccccccccccccaaaggcucuuuucagagccaccagaauu

SEQ ID NO: 401 - RNA, 976 nt, Artificial Sequence
  IL12A(23-219) mRNA product TOP UTR opt10
ggggcgcugccuacggagguggcagccaucuccuucucggcaucaagcuuacccgcaaccucccagucgccacccccgaccccggcauguuccccugccuccaccacucccaaaaccuccuccgcgccgucuccaacaugcuccaaaaagcccgccaaacccucgaauuuuaccccugcaccuccgaagagaucgaccacgaagacaucaccaaagacaaaaccuccacagucgaagccugccucccccucgaacucaccaaaaacgaauccugccuuaacucccgcgaaaccuccuucaucaccaacggcuccugccucgccucccgcaaaaccuccuucaugauggcccucugccucuccuccaucuacgaagaccucaaaauguaccaagucgaauuuaaaaccaugaacgccaaacuccucauggaccccaaacgccaaaucuuccucgaccaaaacaugcucgccgucaucgacgaacucaugcaagcccucaacuucaacuccgaaaccgucccccaaaaauccucccucgaagaacccgacuucuacaaaaccaaaaucaaacuuugcauccuccuccacgcauuccgcauccgcgccgucaccaucgaccgugucaugagcuaccuaaacgccuccugaggacuagugcaucacauuuaaaagcaucucagccuaccaugagaauaagagaaagaaaaugaagaucaauagcuuauucaucucuuuuucuuuuucguugguguaaagccaacacccugucuaaaaaacauaaauuucuuuaaucauuuugccucuuuucucugugcuucaauuaauaaaaaauggaaagaaccuagaucuaaaaaaaaaaaaaaaaaaaaaaaaaaaaaaaaaaaaaaaaaaaaaaaaaaaaaaaaaaaaaaaaugcaucccccccccccccccccccccccccccccccaaaggcucuuuucagagccaccagaauu

SEQ ID NO: 402 - RNA, 1369 nt, Artificial Sequence
  IL12B mRNA product TOP UTR opt10
ggggcgcugccuacggagguggcagccaucuccuucucggcaucaagcuuaccaugugccaccaacaacucgucaucuccugguucucccucgucuuccuagccuccccacucgucgccaucugggaacucaaaaaagacguauacgucgucgaacucgacugguaccccgacgccccaggagaaauggucguccuaaccugcgacacacccgaagaagacgguaucaccuggacccucgaccaauccuccgaaguccuaggcuccggcaagacccucaccauccaagucaaagaauuuggcgacgcaggacaauacaccugucacaaaggcggcgaaguccucagccacagccuucuccuacuccauaaaaaagaagacggcaucugguccacugacauccucaaagaccaaaaagaacccaaaaauaaaaccuuccuccgcugcgaagccaaaaacuacuccggccgauucaccuguugguggcuaaccacaaucagcaccgaccucaccuucucagucaaauccucccgcggcucaucugacccccaaggcgucacaugcggcgccgccacccucuccgccgaacgcguccgcggcgacaacaaagaauacgaauacuccgucgaaugucaagaagacuccgccugccccgccgccgaagaaucacuccccaucgaagucauggucgacgcaguccacaaacucaaauacgaaaacuacaccuccuccuucuucauccgcgacauaauaaaacccgacccacccaaaaaccuccaacucaagccacucaaaaacucccgacaagucgaagucuccugggaguaccccgacaccugguccacaccacacuccuacuucucccucaccuucugcguccaaguccaaggcaaauccaaacgcgaaaaaaaagaccgcguuuucacagacaaaaccuccgccacaguaauaugccgcaaaaacgccuccaucuccguccgggcccaagaccgcuacuacuccuccuccugguccgagugggccucaguccccugcagcuaaggacuagugcaucacauuuaaaagcaucucagccuaccaugagaauaagagaaagaaaaugaagaucaauagcuuauucaucucuuuuucuuuuucguugguguaaagccaacacccugucuaaaaaacauaaauuucuuuaaucauuuugccucuuuucucugugcuucaauuaauaaaaaauggaaagaaccuagaucuaaaaaaaaaaaaaaaaaaaaaaaaaaaaaaaaaaaaaaaaaaaaaaaaaaaaaaaaaaaaaaaaugcaucccccccccccccccccccccccccccccccaaaggcucuuuucagagccaccagaauu

SEQ ID NO: 403 - RNA, 1366 nt, Artificial Sequence
  IL12B(1-328) mRNA product TOP UTR opt10
ggggcgcugccuacggagguggcagccaucuccuucucggcaucaagcuuaccaugugccaccaacaacucgucaucuccugguucucccucgucuuccuagccuccccacucgucgccaucugggaacucaaaaaagacguauacgucgucgaacucgacugguaccccgacgccccaggagaaauggucguccuaaccugcgacacacccgaagaagacgguaucaccuggacccucgaccaauccuccgaaguccuaggcuccggcaagacccucaccauccaagucaaagaauuuggcgacgcaggacaauacaccugucacaaaggcggcgaaguccucagccacagccuucuccuacuccauaaaaaagaagacggcaucugguccacugacauccucaaagaccaaaaagaacccaaaaauaaaaccuuccuccgcugcgaagccaaaaacuacuccggccgauucaccuguugguggcuaaccacaaucagcaccgaccucaccuucucagucaaauccucccgcggcucaucugacccccaaggcgucacaugcggcgccgccacccucuccgccgaacgcguccgcggcgacaacaaagaauacgaauacuccgucgaaugucaagaagacuccgccugccccgccgccgaagaaucacuccccaucgaagucauggucgacgcaguccacaaacucaaauacgaaaacuacaccuccuccuucuucauccgcgacauaauaaaacccgacccacccaaaaaccuccaacucaagccacucaaaaacucccgacaagucgaagucuccugggaguaccccgacaccugguccacaccacacuccuacuucucccucaccuucugcguccaaguccaaggcaaauccaaacgcgaaaaaaaagaccgcguuuucacagacaaaaccuccgccacaguaauaugccgcaaaaacgccuccaucuccguccgggcccaagaccgcuacuacuccuccuccugguccgagugggccucaguccccugcagcggacuagugcaucacauuuaaaagcaucucagccuaccaugagaauaagagaaagaaaaugaagaucaauagcuuauucaucucuuuuucuuuuucguugguguaaagccaacacccugucuaaaaaacauaaauuucuuuaaucauuuugccucuuuucucugugcuucaauuaauaaaaaauggaaagaaccuagaucuaaaaaaaaaaaaaaaaaaaaaaaaaaaaaaaaaaaaaaaaaaaaaaaaaaaaaaaaaaaaaaaaugcaucccccccccccccccccccccccccccccccaaaggcucuuuucagagccaccagaauu

SEQ ID NO: 404 - RNA, 1303 nt, Artificial Sequence
  IL12B(23-328) mRNA product TOP UTR opt10
ggggcgcugccuacggagguggcagccaucuccuucucggcaucaagcuuaccaucugggaacucaaaaaagacguauacgucgucgaacucgacugguaccccgacgccccaggagaaauggucguccuaaccugcgacacacccgaagaagacgguaucaccuggacccucgaccaauccuccgaaguccuaggcuccggcaagacccucaccauccaagucaaagaauuuggcgacgcaggacaauacaccugucacaaaggcggcgaaguccucagccacagccuucuccuacuccauaaaaaagaagacggcaucugguccacugacauccucaaagaccaaaaagaacccaaaaauaaaaccuuccuccgcugcgaagccaaaaacuacuccggccgauucaccuguugguggcuaaccacaaucagcaccgaccucaccuucucagucaaauccucccgcggcucaucugacccccaaggcgucacaugcggcgccgccacccucuccgccgaacgcguccgcggcgacaacaaagaauacgaauacuccgucgaaugucaagaagacuccgccugccccgccgccgaagaaucacuccccaucgaagucauggucgacgcaguccacaaacucaaauacgaaaacuacaccuccuccuucuucauccgcgacauaauaaaacccgacccacccaaaaaccuccaacucaagccacucaaaaacucccgacaagucgaagucuccugggaguaccccgacaccugguccacaccacacuccuacuucucccucaccuucugcguccaaguccaaggcaaauccaaacgcgaaaaaaaagaccgcguuuucacagacaaaaccuccgccacaguaauaugccgcaaaaacgccuccaucuccguccgggcccaagaccgcuacuacuccuccuccugguccgagugggccucaguccccugcagcuaaggacuagugcaucacauuuaaaagcaucucagccuaccaugagaauaagagaaagaaaaugaagaucaauagcuuauucaucucuuuuucuuuuucguugguguaaagccaacacccugucuaaaaaacauaaauuucuuuaaucauuuugccucuuuucucugugcuucaauuaauaaaaaauggaaagaaccuagaucuaaaaaaaaaaaaaaaaaaaaaaaaaaaaaaaaaaaaaaaaaaaaaaaaaaaaaaaaaaaaaaaaugcaucccccccccccccccccccccccccccccccaaaggcucuuuucagagccaccagaauu

SEQ ID NO: 405 - RNA, 436 nt, Artificial Sequence; identical to SEQ ID NO: 394
  Linker-sFvCC49-218 mRNA product TOP UTR opt10

SEQ ID NO: 406 - RNA, 2014 nt, Artificial Sequence
  IL12 mRNA product TOP UTR opt10
ggggcgcugccuacggagguggcagccaucuccuucucggcaucaagcuuaccaugugccaccaacaacucgucaucuccugguucucccucgucuuccuagccuccccacucgucgccaucugggaacucaaaaaagacguauacgucgucgaacucgacugguaccccgacgccccaggagaaauggucguccuaaccugcgacacacccgaagaagacgguaucaccuggacccucgaccaauccuccgaaguccuaggcuccggcaagacccucaccauccaagucaaagaauuuggcgacgcaggacaauacaccugucacaaaggcggcgaaguccucagccacagccuucuccuacuccauaaaaaagaagacggcaucugguccacugacauccucaaagaccaaaaagaacccaaaaauaaaaccuuccuccgcugcgaagccaaaaacuacuccggccgauucaccuguugguggcuaaccacaaucagcaccgaccucaccuucucagucaaauccucccgcggcucaucugacccccaaggcgucacaugcggcgccgccacccucuccgccgaacgcguccgcggcgacaacaaagaauacgaauacuccgucgaaugucaagaagacuccgccugccccgccgccgaagaaucacuccccaucgaagucauggucgacgcaguccacaaacucaaauacgaaaacuacaccuccuccuucuucauccgcgacauaauaaaacccgacccacccaaaaaccuccaacucaagccacucaaaaacucccgacaagucgaagucuccugggaguaccccgacaccugguccacaccacacuccuacuucucccucaccuucugcguccaaguccaaggcaaauccaaacgcgaaaaaaaagaccgcguuuucacagacaaaaccuccgccacaguaauaugccgcaaaaacgccuccaucuccguccgggcccaagaccgcuacuacuccuccuccugguccgagugggccucaguccccugcagcgggaguacgagugggagugggaagccggggaguggggaggggaguacgaaggggcgcaaccucccagucgccacccccgaccccggcauguuccccugccuccaccacucccaaaaccuccuccgcgccgucuccaacaugcuccaaaaagcccgccaaacccucgaauuuuaccccugcaccuccgaagagaucgaccacgaagacaucaccaaagacaaaaccuccacagucgaagccugccucccccucgaacucaccaaaaacgaauccugccuuaacucccgcgaaaccuccuucaucaccaacggcuccugccucgccucccgcaaaaccuccuucaugauggcccucugccucuccuccaucuacgaagaccucaaaauguaccaagucgaauuuaaaaccaugaacgccaaacuccucauggaccccaaacgccaaaucuuccucgaccaaaacaugcucgccgucaucgacgaacucaugcaagcccucaacuucaacuccgaaaccgucccccaaaaauccucccucgaagaacccgacuucuacaaaaccaaaaucaaacuuugcauccuccuccacgcauuccgcauccgcgccgucaccaucgaccgugucaugagcuaccuaaacgccuccugaggacuagugcaucacauuuaaaagcaucucagccuaccaugagaauaagagaaagaaaaugaagaucaauagcuuauucaucucuuuuucuuuuucguugguguaaagccaacacccugucuaaaaaacauaaauuucuuuaaucauuuugccucuuuucucugugcuucaauuaauaaaaaauggaaagaaccuagaucuaaaaaaaaaaaaaaaaaaaaaaaaaaaaaaaaaaaaaaaaaaaaaaaaaaaaaaaaaaaaaaaaugcaucccccccccccccccccccccccccccccccaaaggcucuuuucagagccaccagaauu

SEQ ID NO: 407 - RNA, 1168 nt, Artificial Sequence
  CD40LG mRNA product TOP UTR opt10
ggggcgcugccuacggagguggcagccaucuccuucucggcaucaagcuuaccaugaucgaaaccuacaaucaaaccuccccccgcagcgccgcaacaggccuccccaucuccaugaaaaucuucauguaccuccucaccgucuuccuaaucacccaaaugaucggcuccgcccuauucgccgucuaccuccaccgccgccucgacaaaaucgaagacgaacgcaaccuccacgaagacuuugucuucaugaaaacuauccaacgaugcaacaccggcgaacgaucccuaucccuccucaacugcgaagaaauaaaaucccaauucgaaggauucgucaaagacaucaugcuaaacaaagaagaaaccaaaaaagaaaacuccuucgaaaugcaaaaaggcgaccaaaacccccaaaucgcagcccacgucaucucagaagcaucuuccaaaaccaccuccguccuccaaugggccgaaaaaggcuacuacaccaugucaaacaaccucgucacccucgaaaacggcaaacaacucaccgucaaacgccaaggccucuacuacaucuacgcacaagucaccuucugcuccaaccgcgaagcauccucccaagcccccuucaucgccucccucugccucaaaucccccggccgcuucgaacgcauccuccuccgcgccgcaaauacccacuccuccgccaaaccaugcggccaacaauccauccaccucggcggcgucuucgaacuccaacccggcgccuccgucuucgucaacgucaccgaccccucccaaguaucccauggaaccggcuucaccuccuucggccuccucaaacucuagggacuagugcaucacauuuaaaagcaucucagccuaccaugagaauaagagaaagaaaaugaagaucaauagcuuauucaucucuuuuucuuuuucguugguguaaagccaacacccugucuaaaaaacauaaauuucuuuaaucauuuugccucuuuucucugugcuucaauuaauaaaaaauggaaagaaccuagaucuaaaaaaaaaaaaaaaaaaaaaaaaaaaaaaaaaaaaaaaaaaaaaaaaaaaaaaaaaaaaaaaaugcaucccccccccccccccccccccccccccccccaaaggcucuuuucagagccaccagaauu

SEQ ID NO: 408 - DNA, 42 bp, Artificial Sequence
  5-UTR of human ribosomal protein Large 32 lacking the 5 terminal oligopyrimidine tract
ggcgctgcctacggaggtggcagccatctccttctcggcatc

SEQ ID NO: 409 - RNA, 42 nt, Artificial Sequence
  5-UTR of human ribosomal protein Large 32 lacking the 5 terminal oligopyrimidine tract mRNA
ggcgcugccuacggagguggcagccaucuccuucucggcauc

SEQ ID NO: 410 - DNA, 75 bp, Artificial Sequence
  5-UTR of human mitochondrial ATP synthase subunit alpha lacking the 5 terminal oligopyrimidine tract
gcggctcggccattttgtcccagtcagtccggaggctgcggctgcagaagtaccgcctgcggagtaactgcaaag

SEQ ID NO: 411 - RNA, 75 nt, Artificial Sequence
  5-UTR of human mitochondrial ATP synthase subunit alpha lacking the 5 terminal oligopyrimidine tract mRNA
gcggcucggccauuuugucccagucaguccggaggcugcggcugcagaaguaccgccugcggaguaacugcaaag

SEQ ID NO: 412 - DNA, 110 bp, Artificial Sequence
  3-UTR of Homo sapiens hemoglobin, alpha 1 (HBA1)
gctggagcctcggtggccatgcttcttgccccttgggcctccccccagcccctcctccccttcctgcacccgtacccccgtggtctttgaataaagtctgagtgggcggc

SEQ ID NO: 413 - RNA, 110 nt, Artificial Sequence
  3-UTR of Homo sapiens hemoglobin, alpha 1 (HBA1) mRNA
gcuggagccucgguggccaugcuucuugccccuugggccuccccccagccccuccuccccuuccugcacccguacccccguggucuuugaauaaagucugagugggcggc

SEQ ID NO: 414 - DNA, 108 bp, Artificial Sequence
  3-UTR of Homo sapiens hemoglobin, alpha 2 (HBA2)
gctggagcctcggtagccgttcctcctgcccgctgggcctcccaacgggccctcctcccctccttgcaccggcccttcctggtctttgaataaagtctgagtgggcag

SEQ ID NO: 415 - RNA, 108 nt, Artificial Sequence
  3-UTR of Homo sapiens hemoglobin, alpha 2 (HBA2) mRNA
gcuggagccucgguagccguuccuccugcccgcugggccucccaacgggcccuccuccccuccuugcaccggcccuuccuggucuuugaauaaagucugagugggcag

SEQ ID NO: 416 - DNA, 132 bp, Artificial Sequence
  3-UTR of Homo sapiens hemoglobin, beta (HBB)
gctcgctttcttgctgtccaatttctattaaaggttcctttgttccctaagtccaactactaaactgggggatattatgaagggccttgagcatctggattctgcctaataaaaaacatttattttcattgc

SEQ ID NO: 417 - RNA, 132 nt, Artificial Sequence
  3-UTR of Homo sapiens hemoglobin, beta (HBB) mRNA
gcucgcuuucuugcuguccaauuucuauuaaagguuccuuuguucccuaaguccaacuacuaaacugggggauauuaugaagggccuugagcaucuggauucugccuaauaaaaaacauuuauuuucauugc

SEQ ID NO: 418 - DNA, 44 bp, Artificial Sequence
  Center, alpha-complex-binding portion of the 3UTR of an alpha-globin gene (muag)
gcccgatgggcctcccaacgggccctcctcccctccttgcaccg

SEQ ID NO: 419 - RNA, 44 nt, Artificial Sequence
  Center, alpha-complex-binding portion of the 3UTR of an alpha-globin gene (muag) mRNA
gcccgaugggccucccaacgggcccuccuccccuccuugcaccg

SEQ ID NO: 420 - DNA, 186 bp, Artificial Sequence
  3-UTR of human albumin
catcacatttaaaagcatctcagcctaccatgagaataagagaaagaaaatgaagatcaaaagcttattcatctgtttttctttttcgttggtgtaaagccaacaccctgtctaaaaaacataaatttctttaatcattttgcctcttttctctgtgcttcaattaataaaaaatggaaagaatct

SEQ ID NO: 421 - RNA, 186 nt, Artificial Sequence
  3-UTR of human albumin mRNA
caucacauuuaaaagcaucucagccuaccaugagaauaagagaaagaaaaugaagaucaaaagcuuauucaucuguuuuucuuuuucguugguguaaagccaacacccugucuaaaaaacauaaauuucuuuaaucauuuugccucuuuucucugugcuucaauuaauaaaaaauggaaagaaucu

SEQ ID NO: 422 - DNA, 186 bp, Artificial Sequence
  3-UTR albumin7
catcacatttaaaagcatctcagcctaccatgagaataagagaaagaaaatgaagatcaatagcttattcatctctttttctttttcgttggtgtaaagccaacaccctgtctaaaaaacataaatttctttaatcattttgcctcttttctctgtgcttcaattaataaaaaatggaaagaacct

SEQ ID NO: 423 - RNA, 186 nt, Artificial Sequence
  3-UTR albumin7 mRNA
caucacauuuaaaagcaucucagccuaccaugagaauaagagaaagaaaaugaagaucaauagcuuauucaucucuuuuucuuuuucguugguguaaagccaacacccugucuaaaaaacauaaauuucuuuaaucauuuugccucuuuucucugugcuucaauuaauaaaaaauggaaagaaccu

SEQ ID NO: 424 - DNA, 187 bp, Artificial Sequence
  3-UTR ALB7
gcatcacatttaaaagcatctcagcctaccatgagaataagagaaagaaaatgaagatcaatagcttattcatctctttttctttttcgttggtgtaaagccaacaccctgtctaaaaaacataaatttctttaatcattttgcctcttttctctgtgcttcaattaataaaaaatggaaagaacct

SEQ ID NO: 425 - RNA, 187 nt, Artificial Sequence
  3-UTR ALB7 mRNA
gcaucacauuuaaaagcaucucagccuaccaugagaauaagagaaagaaaaugaagaucaauagcuuauucaucucuuuuucuuuuucguugguguaaagccaacacccugucuaaaaaacauaaauuucuuuaaucauuuugccucuuuucucugugcuucaauuaauaaaaaauggaaagaaccu

SEQ ID NO: 426 - DNA, 24 bp, Artificial Sequence
  histone stem-loop sequence
caaaggctcttttcagagccacca

SEQ ID NO: 427 - RNA, 24 nt, Artificial Sequence
  histone stem-loop sequence mRNA
caaaggcucuuuucagagccacca

SEQ ID NO: 428 - DNA, 13 bp, Artificial Sequence
  Kozak
gccgccaccatgg

SEQ ID NO: 429 - RNA, 13 nt, Artificial Sequence
  Kozak mRNA
gccgccaccaugg

SEQ ID NO: 430 - RNA, 2023 nt, Artificial Sequence
  R2763 MmIL-12 mRNA product TOP UTR opt1
ggggcgcugccuacggagguggcagccaucuccuucucggcaucaagcuuaccaugugcccccagaagcugaccaucagcugguucgccaucgugcuccuggucuccccgcugauggccaugugggagcucgagaaggacguguacguggucgagguggacuggacccccgacgcgcccggcgagacggugaaccugaccugcgacacccccgaggaggacgacaucaccuggacgagcgaccagcggcacggggucaucggcuccgggaagacccugaccaucaccgugaaggaguuccucgacgccggccaguacacgugccacaagggcggcgagacccugagccacucccaccugcuccugcacaagaaggagaacgggaucuggagcaccgagauccugaagaacuucaagaacaagaccuuccucaagugcgaggccccgaacuacuccgggcgcuucacgugcagcuggcuggugcagcggaacauggaccugaaguucaacaucaaguccagcuccagcucccccgacagccgcgccgucaccugcggcauggccucccucagcgcggagaaggugacccuggaccagcgggacuacgagaaguacuccgugagcugccaggaggacgucaccugccccacggccgaggagacccugcccaucgagcucgcccuggaggcccgccagcagaacaaguacgagaacuacuccaccagcuucuucauccgggacaucaucaagccggacccccccaagaaccugcagaugaagccccucaagaacagccagguggagguguccugggaguacccggacagcugguccaccccgcacagcuacuucucccugaaguucuucguccgcauccagcggaagaaggagaagaugaaggagacggaggaggggugcaaccagaagggcgcguuccugguggagaagaccagcaccgaggugcagugcaagggcgggaacgucugcgugcaggcccaggaccgguacuacaacuccagcugcuccaagugggccugcgugcccugccggguccgcagcggcaguacuucgggcagugguaagccugguaguggugaggguaguacuaagggucgcgugauccccgucagcggcccggcccggugccugucccagagccgcaaccugcucaagaccacggacgacauggugaagaccgcccgggagaagcugaagcacuacuccugcaccgccgaggacaucgaccacgaggacaucacccgcgaccagacgagcacccugaagaccugccucccccuggagcugcacaagaacgaguccugccucgccacccgggagacgagcuccaccacccgcgggagcugccugccgccccagaagaccucccugaugaugacgcucugccugggcagcaucuacgaggaccugaagauguaccagaccgaguuccaggcgaucaacgccgcccuccagaaccacaaccaccagcagaucauccuggacaaggggaugcugguggccaucgacgagcucaugcagucccugaaccacaacggcgagacccugcggcagaagccgcccgucggggaggcggaccccuaccgcgugaagaugaagcucugcauccugcugcacgccuucagcacccggguggucacgaucaaccgcgugaugggcuaccucuccagcgccugaggacuagugcaucacauuuaaaagcaucucagccuaccaugagaauaagagaaagaaaaugaagaucaauagcuuauucaucucuuuuucuuuuucguugguguaaagccaacacccugucuaaaaaacauaaauuucuuuaaucauuuugccucuuuucucugugcuucaauuaauaaaaaauggaaagaaccuagaucuaaaaaaaaaaaaaaaaaaaaaaaaaaaaaaaaaaaaaaaaaaaaaaaaaaaaaaaaaaaaaaaaugcaucccccccccccccccccccccccccccccccaaaggcucuuuucagagccaccagaauu

SEQ ID NO: 431 - RNA, 856 nt, Artificial Sequence
  R3971 MmPdcd1(1-157,C83S) mRNA product TOP UTR opt1
ggggcgcugccuacggagguggcagccaucuccuucucggcaucaagcuuaccaugugggugcgccagguccccuggagcuucaccugggccgugcugcagcucuccuggcagagcggcuggcugcuggaggugccgaacgggcccuggcggucccucaccuucuaccccgccuggcugacggucagcgagggcgcgaacgccaccuucaccugcucccugagcaacugguccgaggaccucaugcugaacuggaaccgccugagccccuccaaccagaccgagaagcaggccgccuucagcaacgggcucucccagccggugcaggacgcccgguuccagaucauccagcugcccaaccgccacgacuuccacaugaacauccuggacacgcggcgcaacgacagcggcaucuaccucugcggggcgaucucccugcaccccaaggccaagaucgaggagagccccggcgccgagcugguggucaccgagcggauccucgagaccuccacccgcuacccgagcugaggacuagugcaucacauuuaaaagcaucucagccuaccaugagaauaagagaaagaaaaugaagaucaauagcuuauucaucucuuuuucuuuuucguugguguaaagccaacacccugucuaaaaaacauaaauuucuuuaaucauuuugccucuuuucucugugcuucaauuaauaaaaaauggaaagaaccuagaucuaaaaaaaaaaaaaaaaaaaaaaaaaaaaaaaaaaaaaaaaaaaaaaaaaaaaaaaaaaaaaaaaugcaucccccccccccccccccccccccccccccccaaaggcucuuuucagagccaccagaauu

SEQ ID NO: 432 - RNA, 1165 nt, Artificial Sequence
  R3571 MmCd40lg mRNA product TOP UTR opt1
ggggcgcugccuacggagguggcagccaucuccuucucggcaucaagcuuaccaugaucgagaccuacagccagcccuccccgcggagcguggccaccggccugcccgccuccaugaagaucuucauguaccuccugacggucuuccugaucacccagaugaucgggagcgugcucuucgcgguguaccugcaccgccggcuggacaaggucgaggaggaggugaaccuccacgaggacuucguguucaucaagaagcugaagcgcugcaacaagggcgaggggucccugagccuccugaacugcgaggagaugcggcgccaguucgaggaccuggucaaggacaucacccucaacaaggaggagaagaaggagaacuccuucgagaugcagcggggcgacgaggacccccagaucgccgcccacguggugagcgaggccaacuccaacgccgcgagcguccugcagugggccaagaagggguacuacaccaugaaguccaaccuggugaugcucgagaacggcaagcagcugacggugaagcgcgagggccuguacuacgucuacacccaggugaccuucugcagcaaccgggagcccuccagccagcgcccguucaucguggggcucuggcugaagcccuccagcggcuccgagcggauccugcucaaggccgccaacacccacagcuccagccagcugugcgagcagcagagcguccaccugggcggcguguucgagcuccaggcgggggccuccguguucgucaacgugacggaggccagccaggugauccaccgcgucggguucuccagcuucggccugcugaagcucugaggacuagugcaucacauuuaaaagcaucucagccuaccaugagaauaagagaaagaaaaugaagaucaauagcuuauucaucucuuuuucuuuuucguugguguaaagccaacacccugucuaaaaaacauaaauuucuuuaaucauuuugccucuuuucucugugcuucaauuaauaaaaaauggaaagaaccuagaucuaaaaaaaaaaaaaaaaaaaaaaaaaaaaaaaaaaaaaaaaaaaaaaaaaaaaaaaaaaaaaaaaugcaucccccccccccccccccccccccccccccccaaaggcucuuuucagagccaccagaauu

SEQ ID NO: 433 - RNA, 547 nt, Artificial Sequence
  R2025/R2391
gggagaaagcucaagcuuauccaaguaggcuggucaccuguacaacguagccgguauuuuuuuuuuuuuuuuuuuuuugaccgucucaagguccaaguuagucugccuauaaaggugcggauccacagcugaugaaagacuugugcgguacgguuaaucuccccuuuuuuuuuuuuuuuuuuuuuaguaaaugcgucuacugaauccagcgaugaugcuggcccagaucuucgaccacaagugcauauaguagucaucgagggucgccuuuuuuuuuuuuuuuuuuuuuuuggcccaguucugagacuucgcuagagacuacaguuacagcugcaguaguaaccacugcggcuauugcaggaaaucccguucagguuuuuuuuuuuuuuuuuuuuuccgcucacuaugauuaagaaccagguggagugucacugcucucgaggucucacgagagcgcucgauacaguccuuggaagaaucuuuuuuuuuuuuuuuuuuuuuugugcgacgaucacagagaacuucuauucaugcaggucugcucuag

SEQ ID NO: 434 - RNA, 547 nt, Artificial Sequence
  R3630/R3631
gggagaaagcucaagcuuauccaaguaggcuggucaccuguacaacguagccgguauuuuuuuuuuuuuuuuuuuuuugaccgucucaagguccaaguuagucugccuauaaaggugcggauccacagcugaugaaagacuugugcgguacgguuaaucuccccuuuuuuuuuuuuuuuuuuuuuaguaaaugcgucuacugaauccagcgaugaugcuggcccagaucuucgaccacaagugcauauaguagucaucgagggucgccuuuuuuuuuuuuuuuuuuuuuuuggcccaguucugagacuucgcuagagacuacaguuacagcugcaguaguaaccacugcggcuauugcaggaaaucccguucagguuuuuuuuuuuuuuuuuuuuuccgcucacuaugauuaagaaccagguggagugucacugcucucgaggucucacgagagcgcucgauacagugcuuggaagaaucuuuuuuuuuuuuuuuuuuuuuugugcgacgaucacagagaacuucuauucaugcaggucugcucuag

SEQ ID NO: 435 - RNA, 546 nt, Artificial Sequence
  R722
gggagaaagcucaagcuuauccaaguaggcuggucaccuguacaacguagccgguauuuuuuuuuuuuuuuuuuuuuugaccgucucaagguccaaguuagucugccuauaaaggugcggauccacagcugaugaaagacuugugcgguacgguuaaucuccccuuuuuuuuuuuuuuuuuuuuuaguaaaugcgucuacugaauccagcgaugaugcuggcccagaucuucgaccacaagugcauauaguagucaucgagggucgccuuuuuuuuuuuuuuuuuuuuuuuggcccaguucugagacuucgcuagagacuacaguuacagcugcaguaguaaccacugcggcuauugcaggaaaucccguucagguuuuuuuuuuuuuuuuuuuuuccgcucacuaugauuaagaaccagguggagugucacugcucucgaggucucacgagagcgcucgauacaguccuuggaagaaucuuuuuuuuuuuuuuuuuuuuuugugcgacgaucacagagaacuucuauucaugcaggucugcucua

SEQ ID NO: 436 - RNA, 1083 nt, Artificial Sequence
  R723
gggagaaagcucaagcuuauccaaguaggcuggucaccuguacaacguagccgguauuuuuuuuuuuuuuuuuuuuuugaccgucucaagguccaaguuagucugccuauaaaggugcggauccacagcugaugaaagacuugugcgguacgguuaaucuccccuuuuuuuuuuuuuuuuuuuuuaguaaaugcgucuacugaauccagcgaugaugcuggcccagaucuucgaccacaagugcauauaguagucaucgagggucgccuuuuuuuuuuuuuuuuuuuuuuuggcccaguucugagacuucgcuagagacuacaguuacagcugcaguaguaaccacugcggcuauugcaggaaaucccguucagguuuuuuuuuuuuuuuuuuuuuccgcucacuaugauuaagaaccagguggagugucacugcucucgaggucucacgagagcgcucgauacaguccuuggaagaaucuuuuuuuuuuuuuuuuuuuuuugugcgacgaucacagagaacuucuauucaugcaggucugcucuagaacgaacugaccugacgccugaacuuaugagcgugcguauuuuuuuuuuuuuuuuuuuuuuuccucccaacaaaugucgaucaauagcugggcuguuggagacgcgucagcaaaugccguggcuccauaggacguguagacuucuauuuuuuuuuuuuuuuuuuuuucccgggaccacaaauaauauucuugcuugguugggcgcaagggccccguaucaggucauaaacggguacauguugcacaggcuccuuuuuuuuuuuuuuuuuuuuuuucgcugaguuauuccggucucaaaagacggcagacgucagucgacaacacggucuaaagcagugcuacaaucugccguguucguguuuuuuuuuuuuuuuuuuuugugaaccuacacggcgugcacuguaguucgcaauucauaggguaccggcucagaguuaugccuugguugaaaacugcccagcauacuuuuuuuuuuuuuuuuuuuucauauucccaugcuaagcaagggaugccgcgagucauguuaagcuugaauu

SEQ ID NO: 437 - RNA, 229 nt, Artificial Sequence
  R821
gggagaaagcucaagcuuauccaaguaggcuggucaccuguacaacguagccgguauuuuuuuuuuuuuuuuuuuuuugaccgucucaagguccaaguuagucugccuauaaaggugcggauccacagcugaugaaagacuugugcgguacgguuaaucuccccuuuuuuuuuuuuuuuuuuuuuaguaaaugcgucuacugaauccagcgaugaugcuggcccagauc

SEQ ID NO: 438 - RNA, 867 nt, Artificial Sequence
  PDCD1 CDS mRNA wild type
augcagaucccacaggcgcccuggccagucgucugggcggugcuacaacugggcuggcggccaggaugguucuuagacuccccagacaggcccuggaacccccccaccuucuccccagcccugcucguggugaccgaaggggacaacgccaccuucaccuguagcuucuccaacacaucggagagcuucgugcuaaacugguaccgcaugagccccagcaaccagacggacaagcuggccgcuuuccccgaggaccgcagccagcccggccaggacugccgcuuccgugucacacaacugcccaacgggcgugacuuccacaugagcguggucagggcccggcgcaaugacagcggcaccuaccucuguggggccaucucccuggcccccaaggcgcagaucaaagagagccugcgggcagagcucagggugacagagagaagggcagaagugcccacagcccaccccagccccucacccaggccagccggccaguuccaaacccuggugguuggugucgugggcggccugcugggcagccuggugcugcuagucuggguccuggccgucaucugcucccgggccgcacgagggacaauaggagccaggcgcaccggccagccccugaaggaggaccccucagccgugccuguguucucuguggacuauggggagcuggauuuccaguggcgagagaagaccccggagccccccgugcccugugucccugagcagacggaguaugccaccauugucuuuccuagcggaaugggcaccucaucccccgcccgcaggggcucagccgacggcccucggagugcccagccacugaggccugaggauggacacugcucuuggccccucuga

SEQ ID NO: 439 - RNA, 450 nt, Artificial Sequence
  PDCD1(1-149) CDS mRNA wild type
augcagaucccacaggcgcccuggccagucgucugggcggugcuacaacugggcuggcggccaggaugguucuuagacuccccagacaggcccuggaacccccccaccuucuccccagcccugcucguggugaccgaaggggacaacgccaccuucaccuguagcuucuccaacacaucggagagcuucgugcuaaacugguaccgcaugagccccagcaaccagacggacaagcuggccgcuuuccccgaggaccgcagccagcccggccaggacugccgcuuccgugucacacaacugcccaacgggcgugacuuccacaugagcguggucagggcccggcgcaaugacagcggcaccuaccucuguggggccaucucccuggcccccaaggcgcagaucaaagagagccugcgggcagagcucagggugacagagagaagggcauga

SEQ ID NO: 440 - RNA, 660 nt, Artificial Sequence
  IL12A CDS mRNA wild type
auguguccagcgcgcagccuccuccuuguggcuacccugguccuccuggaccaccucaguuuggccagaaaccuccccguggccacuccagacccaggaauguucccaugccuucaccacucccaaaaccugcugagggccgucagcaacaugcuccagaaggccagacaaacucuagaauuuuacccuugcacuucugaagagauugaucaugaagauaucacaaaagauaaaaccagcacaguggaggccuguuuaccauuggaauuaaccaagaaugagaguugccuaaauuccagagagaccucuuucauaacuaaugggaguugccuggccuccagaaagaccucuuuuaugauggcccugugccuuaguaguauuuaugaagacuugaagauguaccagguggaguucaagaccaugaaugcaaaacuucugauggauccuaagaggcagaucuuucuagaucaaaacaugcuggcaguuauugaugagcugaugcaggcccugaauuucaacagugagacugugccacaaaaauccucccuugaagaaccggauuuuuauaaaacuaaaaucaagcucugcauacuucuucaugcuuucagaauuagggcagugacuauugauagagugaugagcuaucugaaugcuuccuaa

SEQ ID NO: 441 - RNA, 657 nt, Artificial Sequence
  IL12A(1-219) CDS mRNA wild type
auguguccagcgcgcagccuccuccuuguggcuacccugguccuccuggaccaccucaguuuggccagaaaccuccccguggccacuccagacccaggaauguucccaugccuucaccacucccaaaaccugcugagggccgucagcaacaugcuccagaaggccagacaaacucuagaauuuuacccuugcacuucugaagagauugaucaugaagauaucacaaaagauaaaaccagcacaguggaggccuguuuaccauuggaauuaaccaagaaugagaguugccuaaauuccagagagaccucuuucauaacuaaugggaguugccuggccuccagaaagaccucuuuuaugauggcccugugccuuaguaguauuuaugaagacuugaagauguaccagguggaguucaagaccaugaaugcaaaacuucugauggauccuaagaggcagaucuuucuagaucaaaacaugcuggcaguuauugaugagcugaugcaggcccugaauuucaacagugagacugugccacaaaaauccucccuugaagaaccggauuuuuauaaaacuaaaaucaagcucugcauacuucuucaugcuuucagaauuagggcagugacuauugauagagugaugagcuaucugaaugcuucc

SEQ ID NO: 442 - RNA, 594 nt, Artificial Sequence
  IL12A(23-219) CDS mRNA wild type
agaaaccuccccguggccacuccagacccaggaauguucccaugccuucaccacucccaaaaccugcugagggccgucagcaacaugcuccagaaggccagacaaacucuagaauuuuacccuugcacuucugaagagauugaucaugaagauaucacaaaagauaaaaccagcacaguggaggccuguuuaccauuggaauuaaccaagaaugagaguugccuaaauuccagagagaccucuuucauaacuaaugggaguugccuggccuccagaaagaccucuuuuaugauggcccugugccuuaguaguauuuaugaagacuugaagauguaccagguggaguucaagaccaugaaugcaaaacuucugauggauccuaagaggcagaucuuucuagaucaaaacaugcuggcaguuauugaugagcugaugcaggcccugaauuucaacagugagacugugccacaaaaauccucccuugaagaaccggauuuuuauaaaacuaaaaucaagcucugcauacuucuucaugcuuucagaauuagggcagugacuauugauagagugaugagcuaucugaaugcuuccuaa

SEQ ID NO: 443 - RNA, 987 nt, Artificial Sequence
  IL12B CDS mRNA wild type
augugucaccagcaguuggucaucucuugguuuucccugguuuuucuggcaucuccccucguggccauaugggaacugaagaaagauguuuaugucguagaauuggauugguauccggaugccccuggagaaauggugguccucaccugugacaccccugaagaagaugguaucaccuggaccuuggaccagagcagugaggucuuaggcucuggcaaaacccugaccauccaagucaaagaguuuggagaugcuggccaguacaccugucacaaaggaggcgagguucuaagccauucgcuccugcugcuucacaaaaaggaagauggaauuugguccacugauauuuuaaaggaccagaaagaacccaaaaauaagaccuuucuaagaugcgaggccaagaauuauucuggacguuucaccuguugguggcugacgacaaucaguacugauuugacauucagugucaaaagcagcagaggcucaucugacccccaaggggugacgugcggagcugcuacacucucugcagagagagucagaggggacaacaaggaguaugaguacucaguggagugccaggaggacagugccugcccagcugcugaggagagucugcccauugaggucaugguggaugccguucacaagcucaaguaugaaaacuacaccagcagcuucuucaucagggacaucaucaaaccugacccacccaagaacuugcagcugaagccauuaaaaaauucucggcagguugaggucagcugggaguacccugacaccuggaguacuccacauuccuacuucucccugacauucugcguucagguccagggcaagagcaagagagaaaagaaagauagagucuucacggacaagaccucagccacggucaucugccgcaaaaaugccagcauuagcgugcgggcccaggaccgcuacuauagcucaucuuggagcgaaugggcaucugugcccugcaguuag

SEQ ID NO: 444 - RNA, 984 nt, Artificial Sequence
  IL12B(1-328) CDS mRNA wild type
augugucaccagcaguuggucaucucuugguuuucccugguuuuucuggcaucuccccucguggccauaugggaacugaagaaagauguuuaugucguagaauuggauugguauccggaugccccuggagaaauggugguccucaccugugacaccccugaagaagaugguaucaccuggaccuuggaccagagcagugaggucuuaggcucuggcaaaacccugaccauccaagucaaagaguuuggagaugcuggccaguacaccugucacaaaggaggcgagguucuaagccauucgcuccugcugcuucacaaaaaggaagauggaauuugguccacugauauuuuaaaggaccagaaagaacccaaaaauaagaccuuucuaagaugcgaggccaagaauuauucuggacguuucaccuguugguggcugacgacaaucaguacugauuugacauucagugucaaaagcagcagaggcucaucugacccccaaggggugacgugcggagcugcuacacucucugcagagagagucagaggggacaacaaggaguaugaguacucaguggagugccaggaggacagugccugcccagcugcugaggagagucugcccauugaggucaugguggaugccguucacaagcucaaguaugaaaacuacaccagcagcuucuucaucagggacaucaucaaaccugacccacccaagaacuugcagcugaagccauuaaaaaauucucggcagguugaggucagcugggaguacccugacaccuggaguacuccacauuccuacuucucccugacauucugcguucagguccagggcaagagcaagagagaaaagaaagauagagucuucacggacaagaccucagccacggucaucugccgcaaaaaugccagcauuagcgugcgggcccaggaccgcuacuauagcucaucuuggagcgaaugggcaucugugcccugcagu

SEQ ID NO: 445 - RNA, 921 nt, Artificial Sequence
  IL12B(23-328) CDS mRNA wild type
auaugggaacugaagaaagauguuuaugucguagaauuggauugguauccggaugccccuggagaaauggugguccucaccugugacaccccugaagaagaugguaucaccuggaccuuggaccagagcagugaggucuuaggcucuggcaaaacccugaccauccaagucaaagaguuuggagaugcuggccaguacaccugucacaaaggaggcgagguucuaagccauucgcuccugcugcuucacaaaaaggaagauggaauuugguccacugauauuuuaaaggaccagaaagaacccaaaaauaagaccuuucuaagaugcgaggccaagaauuauucuggacguuucaccuguugguggcugacgacaaucaguacugauuugacauucagugucaaaagcagcagaggcucaucugacccccaaggggugacgugcggagcugcuacacucucugcagagagagucagaggggacaacaaggaguaugaguacucaguggagugccaggaggacagugccugcccagcugcugaggagagucugcccauugaggucaugguggaugccguucacaagcucaaguaugaaaacuacaccagcagcuucuucaucagggacaucaucaaaccugacccacccaagaacuugcagcugaagccauuaaaaaauucucggcagguugaggucagcugggaguacccugacaccuggaguacuccacauuccuacuucucccugacauucugcguucagguccagggcaagagcaagagagaaaagaaagauagagucuucacggacaagaccucagccacggucaucugccgcaaaaaugccagcauuagcgugcgggcccaggaccgcuacuauagcucaucuuggagcgaaugggcaucugugcccugcaguuag

SEQ ID NO: 446 - RNA, 54 nt, Artificial Sequence; identical to SEQ ID NO: 20
  Linker-sFvCC49-218 CDS mRNA wild type

SEQ ID NO: 447 - RNA, 1632 nt, Artificial Sequence
  IL12 CDS mRNA wild type
augugucaccagcaguuggucaucucuugguuuucccugguuuuucuggcaucuccccucguggccauaugggaacugaagaaagauguuuaugucguagaauuggauugguauccggaugccccuggagaaauggugguccucaccugugacaccccugaagaagaugguaucaccuggaccuuggaccagagcagugaggucuuaggcucuggcaaaacccugaccauccaagucaaagaguuuggagaugcuggccaguacaccugucacaaaggaggcgagguucuaagccauucgcuccugcugcuucacaaaaaggaagauggaauuugguccacugauauuuuaaaggaccagaaagaacccaaaaauaagaccuuucuaagaugcgaggccaagaauuauucuggacguuucaccuguugguggcugacgacaaucaguacugauuugacauucagugucaaaagcagcagaggcucaucugacccccaaggggugacgugcggagcugcuacacucucugcagagagagucagaggggacaacaaggaguaugaguacucaguggagugccaggaggacagugccugcccagcugcugaggagagucugcccauugaggucaugguggaugccguucacaagcucaaguaugaaaacuacaccagcagcuucuucaucagggacaucaucaaaccugacccacccaagaacuugcagcugaagccauuaaaaaauucucggcagguugaggucagcugggaguacccugacaccuggaguacuccacauuccuacuucucccugacauucugcguucagguccagggcaagagcaagagagaaaagaaagauagagucuucacggacaagaccucagccacggucaucugccgcaaaaaugccagcauuagcgugcgggcccaggaccgcuacuauagcucaucuuggagcgaaugggcaucugugcccugcaguggcaguacuucgggcagugguaagccugguaguggugaggguaguacuaaggguagaaaccuccccguggccacuccagacccaggaauguucccaugccuucaccacucccaaaaccugcugagggccgucagcaacaugcuccagaaggccagacaaacucuagaauuuuacccuugcacuucugaagagauugaucaugaagauaucacaaaagauaaaaccagcacaguggaggccuguuuaccauuggaauuaaccaagaaugagaguugccuaaauuccagagagaccucuuucauaacuaaugggaguugccuggccuccagaaagaccucuuuuaugauggcccugugccuuaguaguauuuaugaagacuugaagauguaccagguggaguucaagaccaugaaugcaaaacuucugauggauccuaagaggcagaucuuucuagaucaaaacaugcuggcaguuauugaugagcugaugcaggcccugaauuucaacagugagacugugccacaaaaauccucccuugaagaaccggauuuuuauaaaacuaaaaucaagcucugcauacuucuucaugcuuucagaauuagggcagugacuauugauagagugaugagcuaucugaaugcuuccuaa

SEQ ID NO: 448 - RNA, 786 nt, Artificial Sequence
  CD40LG CDS mRNA wild type
augaucgaaacauacaaccaaacuucuccccgaucugcggccacuggacugcccaucagcaugaaaauuuuuauguauuuacuuacuguuuuucuuaucacccagaugauugggucagcacuuuuugcuguguaucuucauagaagguuggacaagauagaagaugaaaggaaucuucaugaagauuuuguauucaugaaaacgauacagagaugcaacacaggagaaagauccuuauccuuacugaacugugaggagauuaaaagccaguuugaaggcuuugugaaggauauaauguuaaacaaagaggagacgaagaaagaaaacagcuuugaaaugcaaaaaggugaucagaauccucaaauugcggcacaugucauaagugaggccagcaguaaaacaacaucuguguuacagugggcugaaaaaggauacuacaccaugagcaacaacuugguaacccuggaaaaugggaaacagcugaccguuaaaagacaaggacucuauuauaucuaugcccaagucaccuucuguuccaaucgggaagcaucgagucaagcuccauuuauagccagccucugccuaaagucccccgguagauucgagagaaucuuacucagagcugcaaauacccacaguuccgccaaaccuugcgggcaacaauccauucacuugggaggaguauuugaauugcaaccaggugcuucgguguuugucaaugugacugauccaagccaagugagccauggcacuggcuucacguccuuuggcuuacucaaacucuga

SEQ ID NO: 449 - RNA, 1084 nt, Artificial Sequence
  PDCD1 mRNA product wild type
gggagaaagcuuaccaugcagaucccacaggcgcccuggccagucgucugggcggugcuacaacugggcuggcggccaggaugguucuuagacuccccagacaggcccuggaacccccccaccuucuccccagcccugcucguggugaccgaaggggacaacgccaccuucaccuguagcuucuccaacacaucggagagcuucgugcuaaacugguaccgcaugagccccagcaaccagacggacaagcuggccgcuuuccccgaggaccgcagccagcccggccaggacugccgcuuccgugucacacaacugcccaacgggcgugacuuccacaugagcguggucagggcccggcgcaaugacagcggcaccuaccucuguggggccaucucccuggcccccaaggcgcagaucaaagagagccugcgggcagagcucagggugacagagagaagggcagaagugcccacagcccaccccagccccucacccaggccagccggccaguuccaaacccuggugguuggugucgugggcggccugcugggcagccuggugcugcuagucuggguccuggccgucaucugcucccgggccgcacgagggacaauaggagccaggcgcaccggccagccccugaaggaggaccccucagccgugccuguguucucuguggacuauggggagcuggauuuccaguggcgagagaagaccccggagccccccgugcccugugucccugagcagacggaguaugccaccauugucuuuccuagcggaaugggcaccucaucccccgcccgcaggggcucagccgacggcccucggagugcccagccacugaggccugaggauggacacugcucuuggccccucugaggacuaguuauaagacugacuagcccgaugggccucccaacgggcccuccuccccuccuugcaccgagauuaauaaaaaaaaaaaaaaaaaaaaaaaaaaaaaaaaaaaaaaaaaaaaaaaaaaaaaaaaaaaaaaaaugcaucccccccccccccccccccccccccccccccaaaggcucuuuucagagccaccagaauu

SEQ ID NO: 450 - RNA, 667 nt, Artificial Sequence
  PDCD1(1-149) mRNA product wild type
gggagaaagcuuaccaugcagaucccacaggcgcccuggccagucgucugggcggugcuacaacugggcuggcggccaggaugguucuuagacuccccagacaggcccuggaacccccccaccuucuccccagcccugcucguggugaccgaaggggacaacgccaccuucaccuguagcuucuccaacacaucggagagcuucgugcuaaacugguaccgcaugagccccagcaaccagacggacaagcuggccgcuuuccccgaggaccgcagccagcccggccaggacugccgcuuccgugucacacaacugcccaacgggcgugacuuccacaugagcguggucagggcccggcgcaaugacagcggcaccuaccucuguggggccaucucccuggcccccaaggcgcagaucaaagagagccugcgggcagagcucagggugacagagagaagggcaugaggacuaguuauaagacugacuagcccgaugggccucccaacgggcccuccuccccuccuugcaccgagauuaauaaaaaaaaaaaaaaaaaaaaaaaaaaaaaaaaaaaaaaaaaaaaaaaaaaaaaaaaaaaaaaaaugcaucccccccccccccccccccccccccccccccaaaggcucuuuucagagccaccagaauu

SEQ ID NO: 451 - RNA, 877 nt, Artificial Sequence
  IL12A mRNA product wild type
gggagaaagcuuaccauguguccagcgcgcagccuccuccuuguggcuacccugguccuccuggaccaccucaguuuggccagaaaccuccccguggccacuccagacccaggaauguucccaugccuucaccacucccaaaaccugcugagggccgucagcaacaugcuccagaaggccagacaaacucuagaauuuuacccuugcacuucugaagagauugaucaugaagauaucacaaaagauaaaaccagcacaguggaggccuguuuaccauuggaauuaaccaagaaugagaguugccuaaauuccagagagaccucuuucauaacuaaugggaguugccuggccuccagaaagaccucuuuuaugauggcccugugccuuaguaguauuuaugaagacuugaagauguaccagguggaguucaagaccaugaaugcaaaacuucugauggauccuaagaggcagaucuuucuagaucaaaacaugcuggcaguuauugaugagcugaugcaggcccugaauuucaacagugagacugugccacaaaaauccucccuugaagaaccggauuuuuauaaaacuaaaaucaagcucugcauacuucuucaugcuuucagaauuagggcagugacuauugauagagugaugagcuaucugaaugcuuccuaaggacuaguuauaagacugacuagcccgaugggccucccaacgggcccuccuccccuccuugcaccgagauuaauaaaaaaaaaaaaaaaaaaaaaaaaaaaaaaaaaaaaaaaaaaaaaaaaaaaaaaaaaaaaaaaaugcaucccccccccccccccccccccccccccccccaaaggcucuuuucagagccaccagaauu

SEQ ID NO: 452 - RNA, 874 nt, Artificial Sequence
  IL12A(1-219) mRNA product wild type
gggagaaagcuuaccauguguccagcgcgcagccuccuccuuguggcuacccugguccuccuggaccaccucaguuuggccagaaaccuccccguggccacuccagacccaggaauguucccaugccuucaccacucccaaaaccugcugagggccgucagcaacaugcuccagaaggccagacaaacucuagaauuuuacccuugcacuucugaagagauugaucaugaagauaucacaaaagauaaaaccagcacaguggaggccuguuuaccauuggaauuaaccaagaaugagaguugccuaaauuccagagagaccucuuucauaacuaaugggaguugccuggccuccagaaagaccucuuuuaugauggcccugugccuuaguaguauuuaugaagacuugaagauguaccagguggaguucaagaccaugaaugcaaaacuucugauggauccuaagaggcagaucuuucuagaucaaaacaugcuggcaguuauugaugagcugaugcaggcccugaauuucaacagugagacugugccacaaaaauccucccuugaagaaccggauuuuuauaaaacuaaaaucaagcucugcauacuucuucaugcuuucagaauuagggcagugacuauugauagagugaugagcuaucugaaugcuuccggacuaguuauaagacugacuagcccgaugggccucccaacgggcccuccuccccuccuugcaccgagauuaauaaaaaaaaaaaaaaaaaaaaaaaaaaaaaaaaaaaaaaaaaaaaaaaaaaaaaaaaaaaaaaaaugcaucccccccccccccccccccccccccccccccaaaggcucuuuucagagccaccagaauu

SEQ ID NO: 453 - RNA, 811 nt, Artificial Sequence
  IL12A(23-219) mRNA product wild type
gggagaaagcuuaccagaaaccuccccguggccacuccagacccaggaauguucccaugccuucaccacucccaaaaccugcugagggccgucagcaacaugcuccagaaggccagacaaacucuagaauuuuacccuugcacuucugaagagauugaucaugaagauaucacaaaagauaaaaccagcacaguggaggccuguuuaccauuggaauuaaccaagaaugagaguugccuaaauuccagagagaccucuuucauaacuaaugggaguugccuggccuccagaaagaccucuuuuaugauggcccugugccuuaguaguauuuaugaagacuugaagauguaccagguggaguucaagaccaugaaugcaaaacuucugauggauccuaagaggcagaucuuucuagaucaaaacaugcuggcaguuauugaugagcugaugcaggcccugaauuucaacagugagacugugccacaaaaauccucccuugaagaaccggauuuuuauaaaacuaaaaucaagcucugcauacuucuucaugcuuucagaauuagggcagugacuauugauagagugaugagcuaucugaaugcuuccuaaggacuaguuauaagacugacuagcccgaugggccucccaacgggcccuccuccccuccuugcaccgagauuaauaaaaaaaaaaaaaaaaaaaaaaaaaaaaaaaaaaaaaaaaaaaaaaaaaaaaaaaaaaaaaaaaugcaucccccccccccccccccccccccccccccccaaaggcucuuuucagagccaccagaauu

SEQ ID NO: 454 - RNA, 1204 nt, Artificial Sequence
  IL12B mRNA product wild type
gggagaaagcuuaccaugugucaccagcaguuggucaucucuugguuuucccugguuuuucuggcaucuccccucguggccauaugggaacugaagaaagauguuuaugucguagaauuggauugguauccggaugccccuggagaaauggugguccucaccugugacaccccugaagaagaugguaucaccuggaccuuggaccagagcagugaggucuuaggcucuggcaaaacccugaccauccaagucaaagaguuuggagaugcuggccaguacaccugucacaaaggaggcgagguucuaagccauucgcuccugcugcuucacaaaaaggaagauggaauuugguccacugauauuuuaaaggaccagaaagaacccaaaaauaagaccuuucuaagaugcgaggccaagaauuauucuggacguuucaccuguugguggcugacgacaaucaguacugauuugacauucagugucaaaagcagcagaggcucaucugacccccaaggggugacgugcggagcugcuacacucucugcagagagagucagaggggacaacaaggaguaugaguacucaguggagugccaggaggacagugccugcccagcugcugaggagagucugcccauugaggucaugguggaugccguucacaagcucaaguaugaaaacuacaccagcagcuucuucaucagggacaucaucaaaccugacccacccaagaacuugcagcugaagccauuaaaaaauucucggcagguugaggucagcugggaguacccugacaccuggaguacuccacauuccuacuucucccugacauucugcguucagguccagggcaagagcaagagagaaaagaaagauagagucuucacggacaagaccucagccacggucaucugccgcaaaaaugccagcauuagcgugcgggcccaggaccgcuacuauagcucaucuuggagcgaaugggcaucugugcccugcaguuagggacuaguuauaagacugacuagcccgaugggccucccaacgggcccuccuccccuccuugcaccgagauuaauaaaaaaaaaaaaaaaaaaaaaaaaaaaaaaaaaaaaaaaaaaaaaaaaaaaaaaaaaaaaaaaaugcaucccccccccccccccccccccccccccccccaaaggcucuuuucagagccaccagaauu

SEQ ID NO: 455 - RNA, 1201 nt, Artificial Sequence
  IL12B(1-328) mRNA product wild type
gggagaaagcuuaccaugugucaccagcaguuggucaucucuugguuuucccugguuuuucuggcaucuccccucguggccauaugggaacugaagaaagauguuuaugucguagaauuggauugguauccggaugccccuggagaaauggugguccucaccugugacaccccugaagaagaugguaucaccuggaccuuggaccagagcagugaggucuuaggcucuggcaaaacccugaccauccaagucaaagaguuuggagaugcuggccaguacaccugucacaaaggaggcgagguucuaagccauucgcuccugcugcuucacaaaaaggaagauggaauuugguccacugauauuuuaaaggaccagaaagaacccaaaaauaagaccuuucuaagaugcgaggccaagaauuauucuggacguuucaccuguugguggcugacgacaaucaguacugauuugacauucagugucaaaagcagcagaggcucaucugacccccaaggggugacgugcggagcugcuacacucucugcagagagagucagaggggacaacaaggaguaugaguacucaguggagugccaggaggacagugccugcccagcugcugaggagagucugcccauugaggucaugguggaugccguucacaagcucaaguaugaaaacuacaccagcagcuucuucaucagggacaucaucaaaccugacccacccaagaacuugcagcugaagccauuaaaaaauucucggcagguugaggucagcugggaguacccugacaccuggaguacuccacauuccuacuucucccugacauucugcguucagguccagggcaagagcaagagagaaaagaaagauagagucuucacggacaagaccucagccacggucaucugccgcaaaaaugccagcauuagcgugcgggcccaggaccgcuacuauagcucaucuuggagcgaaugggcaucugugcccugcaguggacuaguuauaagacugacuagcccgaugggccucccaacgggcccuccuccccuccuugcaccgagauuaauaaaaaaaaaaaaaaaaaaaaaaaaaaaaaaaaaaaaaaaaaaaaaaaaaaaaaaaaaaaaaaaaugcaucccccccccccccccccccccccccccccccaaaggcucuuuucagagccaccagaauu

SEQ ID NO: 456 - RNA, 1138 nt, Artificial Sequence
  IL12B(23-328) mRNA product wild type
gggagaaagcuuaccauaugggaacugaagaaagauguuuaugucguagaauuggauugguauccggaugccccuggagaaauggugguccucaccugugacaccccugaagaagaugguaucaccuggaccuuggaccagagcagugaggucuuaggcucuggcaaaacccugaccauccaagucaaagaguuuggagaugcuggccaguacaccugucacaaaggaggcgagguucuaagccauucgcuccugcugcuucacaaaaaggaagauggaauuugguccacugauauuuuaaaggaccagaaagaacccaaaaauaagaccuuucuaagaugcgaggccaagaauuauucuggacguuucaccuguugguggcugacgacaaucaguacugauuugacauucagugucaaaagcagcagaggcucaucugacccccaaggggugacgugcggagcugcuacacucucugcagagagagucagaggggacaacaaggaguaugaguacucaguggagugccaggaggacagugccugcccagcugcugaggagagucugcccauugaggucaugguggaugccguucacaagcucaaguaugaaaacuacaccagcagcuucuucaucagggacaucaucaaaccugacccacccaagaacuugcagcugaagccauuaaaaaauucucggcagguugaggucagcugggaguacccugacaccuggaguacuccacauuccuacuucucccugacauucugcguucagguccagggcaagagcaagagagaaaagaaagauagagucuucacggacaagaccucagccacggucaucugccgcaaaaaugccagcauuagcgugcgggcccaggaccgcuacuauagcucaucuuggagcgaaugggcaucugugcccugcaguuagggacuaguuauaagacugacuagcccgaugggccucccaacgggcccuccuccccuccuugcaccgagauuaauaaaaaaaaaaaaaaaaaaaaaaaaaaaaaaaaaaaaaaaaaaaaaaaaaaaaaaaaaaaaaaaaugcaucccccccccccccccccccccccccccccccaaaggcucuuuucagagccaccagaauu

SEQ ID NO: 457 - RNA, 271 nt, Artificial Sequence; identical to SEQ ID NO: 152
  Linker-sFvCC49-218 mRNA product wild type

SEQ ID NO: 458 - RNA, 1849 nt, Artificial Sequence
  IL12 mRNA product wild type
gggagaaagcuuaccaugugucaccagcaguuggucaucucuugguuuucccugguuuuucuggcaucuccccucguggccauaugggaacugaagaaagauguuuaugucguagaauuggauugguauccggaugccccuggagaaauggugguccucaccugugacaccccugaagaagaugguaucaccuggaccuuggaccagagcagugaggucuuaggcucuggcaaaacccugaccauccaagucaaagaguuuggagaugcuggccaguacaccugucacaaaggaggcgagguucuaagccauucgcuccugcugcuucacaaaaaggaagauggaauuugguccacugauauuuuaaaggaccagaaagaacccaaaaauaagaccuuucuaagaugcgaggccaagaauuauucuggacguuucaccuguugguggcugacgacaaucaguacugauuugacauucagugucaaaagcagcagaggcucaucugacccccaaggggugacgugcggagcugcuacacucucugcagagagagucagaggggacaacaaggaguaugaguacucaguggagugccaggaggacagugccugcccagcugcugaggagagucugcccauugaggucaugguggaugccguucacaagcucaaguaugaaaacuacaccagcagcuucuucaucagggacaucaucaaaccugacccacccaagaacuugcagcugaagccauuaaaaaauucucggcagguugaggucagcugggaguacccugacaccuggaguacuccacauuccuacuucucccugacauucugcguucagguccagggcaagagcaagagagaaaagaaagauagagucuucacggacaagaccucagccacggucaucugccgcaaaaaugccagcauuagcgugcgggcccaggaccgcuacuauagcucaucuuggagcgaaugggcaucugugcccugcaguggcaguacuucgggcagugguaagccugguaguggugaggguaguacuaaggguagaaaccuccccguggccacuccagacccaggaauguucccaugccuucaccacucccaaaaccugcugagggccgucagcaacaugcuccagaaggccagacaaacucuagaauuuuacccuugcacuucugaagagauugaucaugaagauaucacaaaagauaaaaccagcacaguggaggccuguuuaccauuggaauuaaccaagaaugagaguugccuaaauuccagagagaccucuuucauaacuaaugggaguugccuggccuccagaaagaccucuuuuaugauggcccugugccuuaguaguauuuaugaagacuugaagauguaccagguggaguucaagaccaugaaugcaaaacuucugauggauccuaagaggcagaucuuucuagaucaaaacaugcuggcaguuauugaugagcugaugcaggcccugaauuucaacagugagacugugccacaaaaauccucccuugaagaaccggauuuuuauaaaacuaaaaucaagcucugcauacuucuucaugcuuucagaauuagggcagugacuauugauagagugaugagcuaucugaaugcuuccuaaggacuaguuauaagacugacuagcccgaugggccucccaacgggcccuccuccccuccuugcaccgagauuaauaaaaaaaaaaaaaaaaaaaaaaaaaaaaaaaaaaaaaaaaaaaaaaaaaaaaaaaaaaaaaaaaugcaucccccccccccccccccccccccccccccccaaaggcucuuuucagagccaccagaauu

SEQ ID NO: 459 - RNA, 1003 nt, Artificial Sequence
  CD40LG mRNA product wild type
gggagaaagcuuaccaugaucgaaacauacaaccaaacuucuccccgaucugcggccacuggacugcccaucagcaugaaaauuuuuauguauuuacuuacuguuuuucuuaucacccagaugauugggucagcacuuuuugcuguguaucuucauagaagguuggacaagauagaagaugaaaggaaucuucaugaagauuuuguauucaugaaaacgauacagagaugcaacacaggagaaagauccuuauccuuacugaacugugaggagauuaaaagccaguuugaaggcuuugugaaggauauaauguuaaacaaagaggagacgaagaaagaaaacagcuuugaaaugcaaaaaggugaucagaauccucaaauugcggcacaugucauaagugaggccagcaguaaaacaacaucuguguuacagugggcugaaaaaggauacuacaccaugagcaacaacuugguaacccuggaaaaugggaaacagcugaccguuaaaagacaaggacucuauuauaucuaugcccaagucaccuucuguuccaaucgggaagcaucgagucaagcuccauuuauagccagccucugccuaaagucccccgguagauucgagagaaucuuacucagagcugcaaauacccacaguuccgccaaaccuugcgggcaacaauccauucacuugggaggaguauuugaauugcaaccaggugcuucgguguuugucaaugugacugauccaagccaagugagccauggcacuggcuucacguccuuuggcuuacucaaacucugaggacuaguuauaagacugacuagcccgaugggccucccaacgggcccuccuccccuccuugcaccgagauuaauaaaaaaaaaaaaaaaaaaaaaaaaaaaaaaaaaaaaaaaaaaaaaaaaaaaaaaaaaaaaaaaaugcaucccccccccccccccccccccccccccccccaaaggcucuuuucagagccaccagaauu

SEQ ID NO: 460 - RNA, 1249 nt, Artificial Sequence
  PDCD1 mRNA product TOP UTR wild type
ggggcgcugccuacggagguggcagccaucuccuucucggcaucaagcuuaccaugcagaucccacaggcgcccuggccagucgucugggcggugcuacaacugggcuggcggccaggaugguucuuagacuccccagacaggcccuggaacccccccaccuucuccccagcccugcucguggugaccgaaggggacaacgccaccuucaccuguagcuucuccaacacaucggagagcuucgugcuaaacugguaccgcaugagccccagcaaccagacggacaagcuggccgcuuuccccgaggaccgcagccagcccggccaggacugccgcuuccgugucacacaacugcccaacgggcgugacuuccacaugagcguggucagggcccggcgcaaugacagcggcaccuaccucuguggggccaucucccuggcccccaaggcgcagaucaaagagagccugcgggcagagcucagggugacagagagaagggcagaagugcccacagcccaccccagccccucacccaggccagccggccaguuccaaacccuggugguuggugucgugggcggccugcugggcagccuggugcugcuagucuggguccuggccgucaucugcucccgggccgcacgagggacaauaggagccaggcgcaccggccagccccugaaggaggaccccucagccgugccuguguucucuguggacuauggggagcuggauuuccaguggcgagagaagaccccggagccccccgugcccugugucccugagcagacggaguaugccaccauugucuuuccuagcggaaugggcaccucaucccccgcccgcaggggcucagccgacggcccucggagugcccagccacugaggccugaggauggacacugcucuuggccccucugaggacuagugcaucacauuuaaaagcaucucagccuaccaugagaauaagagaaagaaaaugaagaucaauagcuuauucaucucuuuuucuuuuucguugguguaaagccaacacccugucuaaaaaacauaaauuucuuuaaucauuuugccucuuuucucugugcuucaauuaauaaaaaauggaaagaaccuagaucuaaaaaaaaaaaaaaaaaaaaaaaaaaaaaaaaaaaaaaaaaaaaaaaaaaaaaaaaaaaaaaaaugcaucccccccccccccccccccccccccccccccaaaggcucuuuucagagccaccagaauu

SEQ ID NO: 461 - RNA, 832 nt, Artificial Sequence
  PDCD1(1-149) mRNA product TOP UTR wild type
ggggcgcugccuacggagguggcagccaucuccuucucggcaucaagcuuaccaugcagaucccacaggcgcccuggccagucgucugggcggugcuacaacugggcuggcggccaggaugguucuuagacuccccagacaggcccuggaacccccccaccuucuccccagcccugcucguggugaccgaaggggacaacgccaccuucaccuguagcuucuccaacacaucggagagcuucgugcuaaacugguaccgcaugagccccagcaaccagacggacaagcuggccgcuuuccccgaggaccgcagccagcccggccaggacugccgcuuccgugucacacaacugcccaacgggcgugacuuccacaugagcguggucagggcccggcgcaaugacagcggcaccuaccucuguggggccaucucccuggcccccaaggcgcagaucaaagagagccugcgggcagagcucagggugacagagagaagggcaugaggacuagugcaucacauuuaaaagcaucucagccuaccaugagaauaagagaaagaaaaugaagaucaauagcuuauucaucucuuuuucuuuuucguugguguaaagccaacacccugucuaaaaaacauaaauuucuuuaaucauuuugccucuuuucucugugcuucaauuaauaaaaaauggaaagaaccuagaucuaaaaaaaaaaaaaaaaaaaaaaaaaaaaaaaaaaaaaaaaaaaaaaaaaaaaaaaaaaaaaaaaugcaucccccccccccccccccccccccccccccccaaaggcucuuuucagagccaccagaauu

SEQ ID NO: 462 - RNA, 1042 nt, Artificial Sequence
  IL12A mRNA product TOP UTR wild type
ggggcgcugccuacggagguggcagccaucuccuucucggcaucaagcuuaccauguguccagcgcgcagccuccuccuuguggcuacccugguccuccuggaccaccucaguuuggccagaaaccuccccguggccacuccagacccaggaauguucccaugccuucaccacucccaaaaccugcugagggccgucagcaacaugcuccagaaggccagacaaacucuagaauuuuacccuugcacuucugaagagauugaucaugaagauaucacaaaagauaaaaccagcacaguggaggccuguuuaccauuggaauuaaccaagaaugagaguugccuaaauuccagagagaccucuuucauaacuaaugggaguugccuggccuccagaaagaccucuuuuaugauggcccugugccuuaguaguauuuaugaagacuugaagauguaccagguggaguucaagaccaugaaugcaaaacuucugauggauccuaagaggcagaucuuucuagaucaaaacaugcuggcaguuauugaugagcugaugcaggcccugaauuucaacagugagacugugccacaaaaauccucccuugaagaaccggauuuuuauaaaacuaaaaucaagcucugcauacuucuucaugcuuucagaauuagggcagugacuauugauagagugaugagcuaucugaaugcuuccuaaggacuagugcaucacauuuaaaagcaucucagccuaccaugagaauaagagaaagaaaaugaagaucaauagcuuauucaucucuuuuucuuuuucguugguguaaagccaacacccugucuaaaaaacauaaauuucuuuaaucauuuugccucuuuucucugugcuucaauuaauaaaaaauggaaagaaccuagaucuaaaaaaaaaaaaaaaaaaaaaaaaaaaaaaaaaaaaaaaaaaaaaaaaaaaaaaaaaaaaaaaaugcaucccccccccccccccccccccccccccccccaaaggcucuuuucagagccaccagaauu

SEQ ID NO: 463 - RNA, 1039 nt, Artificial Sequence
  IL12A(1-219) mRNA product TOP UTR wild type
ggggcgcugccuacggagguggcagccaucuccuucucggcaucaagcuuaccauguguccagcgcgcagccuccuccuuguggcuacccugguccuccuggaccaccucaguuuggccagaaaccuccccguggccacuccagacccaggaauguucccaugccuucaccacucccaaaaccugcugagggccgucagcaacaugcuccagaaggccagacaaacucuagaauuuuacccuugcacuucugaagagauugaucaugaagauaucacaaaagauaaaaccagcacaguggaggccuguuuaccauuggaauuaaccaagaaugagaguugccuaaauuccagagagaccucuuucauaacuaaugggaguugccuggccuccagaaagaccucuuuuaugauggcccugugccuuaguaguauuuaugaagacuugaagauguaccagguggaguucaagaccaugaaugcaaaacuucugauggauccuaagaggcagaucuuucuagaucaaaacaugcuggcaguuauugaugagcugaugcaggcccugaauuucaacagugagacugugccacaaaaauccucccuugaagaaccggauuuuuauaaaacuaaaaucaagcucugcauacuucuucaugcuuucagaauuagggcagugacuauugauagagugaugagcuaucugaaugcuuccggacuagugcaucacauuuaaaagcaucucagccuaccaugagaauaagagaaagaaaaugaagaucaauagcuuauucaucucuuuuucuuuuucguugguguaaagccaacacccugucuaaaaaacauaaauuucuuuaaucauuuugccucuuuucucugugcuucaauuaauaaaaaauggaaagaaccuagaucuaaaaaaaaaaaaaaaaaaaaaaaaaaaaaaaaaaaaaaaaaaaaaaaaaaaaaaaaaaaaaaaaugcaucccccccccccccccccccccccccccccccaaaggcucuuuucagagccaccagaauu

SEQ ID NO: 464 - RNA, 976 nt, Artificial Sequence
  IL12A(23-219) mRNA product TOP UTR wild type
ggggcgcugccuacggagguggcagccaucuccuucucggcaucaagcuuaccagaaaccuccccguggccacuccagacccaggaauguucccaugccuucaccacucccaaaaccugcugagggccgucagcaacaugcuccagaaggccagacaaacucuagaauuuuacccuugcacuucugaagagauugaucaugaagauaucacaaaagauaaaaccagcacaguggaggccuguuuaccauuggaauuaaccaagaaugagaguugccuaaauuccagagagaccucuuucauaacuaaugggaguugccuggccuccagaaagaccucuuuuaugauggcccugugccuuaguaguauuuaugaagacuugaagauguaccagguggaguucaagaccaugaaugcaaaacuucugauggauccuaagaggcagaucuuucuagaucaaaacaugcuggcaguuauugaugagcugaugcaggcccugaauuucaacagugagacugugccacaaaaauccucccuugaagaaccggauuuuuauaaaacuaaaaucaagcucugcauacuucuucaugcuuucagaauuagggcagugacuauugauagagugaugagcuaucugaaugcuuccuaaggacuagugcaucacauuuaaaagcaucucagccuaccaugagaauaagagaaagaaaaugaagaucaauagcuuauucaucucuuuuucuuuuucguugguguaaagccaacacccugucuaaaaaacauaaauuucuuuaaucauuuugccucuuuucucugugcuucaauuaauaaaaaauggaaagaaccuagaucuaaaaaaaaaaaaaaaaaaaaaaaaaaaaaaaaaaaaaaaaaaaaaaaaaaaaaaaaaaaaaaaaugcaucccccccccccccccccccccccccccccccaaaggcucuuuucagagccaccagaauu

SEQ ID NO: 465 - RNA, 1369 nt, Artificial Sequence
  IL12B mRNA product TOP UTR wild type
ggggcgcugccuacggagguggcagccaucuccuucucggcaucaagcuuaccaugugucaccagcaguuggucaucucuugguuuucccugguuuuucuggcaucuccccucguggccauaugggaacugaagaaagauguuuaugucguagaauuggauugguauccggaugccccuggagaaauggugguccucaccugugacaccccugaagaagaugguaucaccuggaccuuggaccagagcagugaggucuuaggcucuggcaaaacccugaccauccaagucaaagaguuuggagaugcuggccaguacaccugucacaaaggaggcgagguucuaagccauucgcuccugcugcuucacaaaaaggaagauggaauuugguccacugauauuuuaaaggaccagaaagaacccaaaaauaagaccuuucuaagaugcgaggccaagaauuauucuggacguuucaccuguugguggcugacgacaaucaguacugauuugacauucagugucaaaagcagcagaggcucaucugacccccaaggggugacgugcggagcugcuacacucucugcagagagagucagaggggacaacaaggaguaugaguacucaguggagugccaggaggacagugccugcccagcugcugaggagagucugcccauugaggucaugguggaugccguucacaagcucaaguaugaaaacuacaccagcagcuucuucaucagggacaucaucaaaccugacccacccaagaacuugcagcugaagccauuaaaaaauucucggcagguugaggucagcugggaguacccugacaccuggaguacuccacauuccuacuucucccugacauucugcguucagguccagggcaagagcaagagagaaaagaaagauagagucuucacggacaagaccucagccacggucaucugccgcaaaaaugccagcauuagcgugcgggcccaggaccgcuacuauagcucaucuuggagcgaaugggcaucugugcccugcaguuagggacuagugcaucacauuuaaaagcaucucagccuaccaugagaauaagagaaagaaaaugaagaucaauagcuuauucaucucuuuuucuuuuucguugguguaaagccaacacccugucuaaaaaacauaaauuucuuuaaucauuuugccucuuuucucugugcuucaauuaauaaaaaauggaaagaaccuagaucuaaaaaaaaaaaaaaaaaaaaaaaaaaaaaaaaaaaaaaaaaaaaaaaaaaaaaaaaaaaaaaaaugcaucccccccccccccccccccccccccccccccaaaggcucuuuucagagccaccagaauu

SEQ ID NO: 466 - RNA, 1366 nt, Artificial Sequence
  IL12B(1-328) mRNA product TOP UTR wild type
ggggcgcugccuacggagguggcagccaucuccuucucggcaucaagcuuaccaugugucaccagcaguuggucaucucuugguuuucccugguuuuucuggcaucuccccucguggccauaugggaacugaagaaagauguuuaugucguagaauuggauugguauccggaugccccuggagaaauggugguccucaccugugacaccccugaagaagaugguaucaccuggaccuuggaccagagcagugaggucuuaggcucuggcaaaacccugaccauccaagucaaagaguuuggagaugcuggccaguacaccugucacaaaggaggcgagguucuaagccauucgcuccugcugcuucacaaaaaggaagauggaauuugguccacugauauuuuaaaggaccagaaagaacccaaaaauaagaccuuucuaagaugcgaggccaagaauuauucuggacguuucaccuguugguggcugacgacaaucaguacugauuugacauucagugucaaaagcagcagaggcucaucugacccccaaggggugacgugcggagcugcuacacucucugcagagagagucagaggggacaacaaggaguaugaguacucaguggagugccaggaggacagugccugcccagcugcugaggagagucugcccauugaggucaugguggaugccguucacaagcucaaguaugaaaacuacaccagcagcuucuucaucagggacaucaucaaaccugacccacccaagaacuugcagcugaagccauuaaaaaauucucggcagguugaggucagcugggaguacccugacaccuggaguacuccacauuccuacuucucccugacauucugcguucagguccagggcaagagcaagagagaaaagaaagauagagucuucacggacaagaccucagccacggucaucugccgcaaaaaugccagcauuagcgugcgggcccaggaccgcuacuauagcucaucuuggagcgaaugggcaucugugcccugcaguggacuagugcaucacauuuaaaagcaucucagccuaccaugagaauaagagaaagaaaaugaagaucaauagcuuauucaucucuuuuucuuuuucguugguguaaagccaacacccugucuaaaaaacauaaauuucuuuaaucauuuugccucuuuucucugugcuucaauuaauaaaaaauggaaagaaccuagaucuaaaaaaaaaaaaaaaaaaaaaaaaaaaaaaaaaaaaaaaaaaaaaaaaaaaaaaaaaaaaaaaaugcaucccccccccccccccccccccccccccccccaaaggcucuuuucagagccaccagaauu

SEQ ID NO: 467 - RNA, 1303 nt, Artificial Sequence
  IL12B(23-328) mRNA product TOP UTR wild type
ggggcgcugccuacggagguggcagccaucuccuucucggcaucaagcuuaccauaugggaacugaagaaagauguuuaugucguagaauuggauugguauccggaugccccuggagaaauggugguccucaccugugacaccccugaagaagaugguaucaccuggaccuuggaccagagcagugaggucuuaggcucuggcaaaacccugaccauccaagucaaagaguuuggagaugcuggccaguacaccugucacaaaggaggcgagguucuaagccauucgcuccugcugcuucacaaaaaggaagauggaauuugguccacugauauuuuaaaggaccagaaagaacccaaaaauaagaccuuucuaagaugcgaggccaagaauuauucuggacguuucaccuguugguggcugacgacaaucaguacugauuugacauucagugucaaaagcagcagaggcucaucugacccccaaggggugacgugcggagcugcuacacucucugcagagagagucagaggggacaacaaggaguaugaguacucaguggagugccaggaggacagugccugcccagcugcugaggagagucugcccauugaggucaugguggaugccguucacaagcucaaguaugaaaacuacaccagcagcuucuucaucagggacaucaucaaaccugacccacccaagaacuugcagcugaagccauuaaaaaauucucggcagguugaggucagcugggaguacccugacaccuggaguacuccacauuccuacuucucccugacauucugcguucagguccagggcaagagcaagagagaaaagaaagauagagucuucacggacaagaccucagccacggucaucugccgcaaaaaugccagcauuagcgugcgggcccaggaccgcuacuauagcucaucuuggagcgaaugggcaucugugcccugcaguuagggacuagugcaucacauuuaaaagcaucucagccuaccaugagaauaagagaaagaaaaugaagaucaauagcuuauucaucucuuuuucuuuuucguugguguaaagccaacacccugucuaaaaaacauaaauuucuuuaaucauuuugccucuuuucucugugcuucaauuaauaaaaaauggaaagaaccuagaucuaaaaaaaaaaaaaaaaaaaaaaaaaaaaaaaaaaaaaaaaaaaaaaaaaaaaaaaaaaaaaaaaugcaucccccccccccccccccccccccccccccccaaaggcucuuuucagagccaccagaauu

SEQ ID NO: 468 - RNA, 436 nt, Artificial Sequence; identical to SEQ ID NO: 284
  Linker-sFvCC49-218 mRNA product TOP UTR wild type

SEQ ID NO: 469 - RNA, 2014 nt, Artificial Sequence
  IL12 mRNA product TOP UTR wild type
ggggcgcugccuacggagguggcagccaucuccuucucggcaucaagcuuaccaugugucaccagcaguuggucaucucuugguuuucccugguuuuucuggcaucuccccucguggccauaugggaacugaagaaagauguuuaugucguagaauuggauugguauccggaugccccuggagaaauggugguccucaccugugacaccccugaagaagaugguaucaccuggaccuuggaccagagcagugaggucuuaggcucuggcaaaacccugaccauccaagucaaagaguuuggagaugcuggccaguacaccugucacaaaggaggcgagguucuaagccauucgcuccugcugcuucacaaaaaggaagauggaauuugguccacugauauuuuaaaggaccagaaagaacccaaaaauaagaccuuucuaagaugcgaggccaagaauuauucuggacguuucaccuguugguggcugacgacaaucaguacugauuugacauucagugucaaaagcagcagaggcucaucugacccccaaggggugacgugcggagcugcuacacucucugcagagagagucagaggggacaacaaggaguaugaguacucaguggagugccaggaggacagugccugcccagcugcugaggagagucugcccauugaggucaugguggaugccguucacaagcucaaguaugaaaacuacaccagcagcuucuucaucagggacaucaucaaaccugacccacccaagaacuugcagcugaagccauuaaaaaauucucggcagguugaggucagcugggaguacccugacaccuggaguacuccacauuccuacuucucccugacauucugcguucagguccagggcaagagcaagagagaaaagaaagauagagucuucacggacaagaccucagccacggucaucugccgcaaaaaugccagcauuagcgugcgggcccaggaccgcuacuauagcucaucuuggagcgaaugggcaucugugcccugcaguggcaguacuucgggcagugguaagccugguaguggugaggguaguacuaaggguagaaaccuccccguggccacuccagacccaggaauguucccaugccuucaccacucccaaaaccugcugagggccgucagcaacaugcuccagaaggccagacaaacucuagaauuuuacccuugcacuucugaagagauugaucaugaagauaucacaaaagauaaaaccagcacaguggaggccuguuuaccauuggaauuaaccaagaaugagaguugccuaaauuccagagagaccucuuucauaacuaaugggaguugccuggccuccagaaagaccucuuuuaugauggcccugugccuuaguaguauuuaugaagacuugaagauguaccagguggaguucaagaccaugaaugcaaaacuucugauggauccuaagaggcagaucuuucuagaucaaaacaugcuggcaguuauugaugagcugaugcaggcccugaauuucaacagugagacugugccacaaaaauccucccuugaagaaccggauuuuuauaaaacuaaaaucaagcucugcauacuucuucaugcuuucagaauuagggcagugacuauugauagagugaugagcuaucugaaugcuuccuaaggacuagugcaucacauuuaaaagcaucucagccuaccaugagaauaagagaaagaaaaugaagaucaauagcuuauucaucucuuuuucuuuuucguugguguaaagccaacacccugucuaaaaaacauaaauuucuuuaaucauuuugccucuuuucucugugcuucaauuaauaaaaaauggaaagaaccuagaucuaaaaaaaaaaaaaaaaaaaaaaaaaaaaaaaaaaaaaaaaaaaaaaaaaaaaaaaaaaaaaaaaugcaucccccccccccccccccccccccccccccccaaaggcucuuuucagagccaccagaauu

SEQ ID NO: 470 - RNA, 1168 nt, Artificial Sequence
  CD40LG mRNA product TOP UTR wild type
ggggcgcugccuacggagguggcagccaucuccuucucggcaucaagcuuaccaugaucgaaacauacaaccaaacuucuccccgaucugcggccacuggacugcccaucagcaugaaaauuuuuauguauuuacuuacuguuuuucuuaucacccagaugauugggucagcacuuuuugcuguguaucuucauagaagguuggacaagauagaagaugaaaggaaucuucaugaagauuuuguauucaugaaaacgauacagagaugcaacacaggagaaagauccuuauccuuacugaacugugaggagauuaaaagccaguuugaaggcuuugugaaggauauaauguuaaacaaagaggagacgaagaaagaaaacagcuuugaaaugcaaaaaggugaucagaauccucaaauugcggcacaugucauaagugaggccagcaguaaaacaacaucuguguuacagugggcugaaaaaggauacuacaccaugagcaacaacuugguaacccuggaaaaugggaaacagcugaccguuaaaagacaaggacucuauuauaucuaugcccaagucaccuucuguuccaaucgggaagcaucgagucaagcuccauuuauagccagccucugccuaaagucccccgguagauucgagagaaucuuacucagagcugcaaauacccacaguuccgccaaaccuugcgggcaacaauccauucacuugggaggaguauuugaauugcaaccaggugcuucgguguuugucaaugugacugauccaagccaagugagccauggcacuggcuucacguccuuuggcuuacucaaacucugaggacuagugcaucacauuuaaaagcaucucagccuaccaugagaauaagagaaagaaaaugaagaucaauagcuuauucaucucuuuuucuuuuucguugguguaaagccaacacccugucuaaaaaacauaaauuucuuuaaucauuuugccucuuuucucugugcuucaauuaauaaaaaauggaaagaaccuagaucuaaaaaaaaaaaaaaaaaaaaaaaaaaaaaaaaaaaaaaaaaaaaaaaaaaaaaaaaaaaaaaaaugcaucccccccccccccccccccccccccccccccaaaggcucuuuucagagccaccagaauu

SEQ ID NO: 471 - RNA, 20 nt, Artificial Sequence
  Immune stimulatory RNA
gguuuuuuuuuuuuuuuggg

SEQ ID NO: 472 - RNA, 20 nt, Artificial Sequence
  Immune stimulatory RNA
ggggguuuuuuuuuuggggg

SEQ ID NO: 473 - RNA, 40 nt, Artificial Sequence
  Immune stimulatory RNA
ggggguuuuuuuuuuuuuuuuuuuuuuuuuuuuuuggggg

SEQ ID NO: 474 - RNA, 39 nt, Artificial Sequence
  Immune stimulatory RNA
guguguguguguuuuuuuuuuuuuuuugugugugugugu

SEQ ID NO: 475 - RNA, 39 nt, Artificial Sequence
  Immune stimulatory RNA
gguugguugguuuuuuuuuuuuuuuuugguugguugguu

SEQ ID NO: 476 - RNA, 20 nt, Artificial Sequence
  Immune stimulatory RNA
ggggggggguuugggggggg

SEQ ID NO: 477 - RNA, 20 nt, Artificial Sequence
  Immune stimulatory RNA
gggggggguuuugggggggg

SEQ ID NO: 478 - RNA, 20 nt, Artificial Sequence
  Immune stimulatory RNA
ggggggguuuuuuggggggg

SEQ ID NO: 479 - RNA, 20 nt, Artificial Sequence
  Immune stimulatory RNA
ggggggguuuuuuugggggg

SEQ ID NO: 480 - RNA, 20 nt, Artificial Sequence
  Immune stimulatory RNA
gggggguuuuuuuugggggg

SEQ ID NO: 481 - RNA, 20 nt, Artificial Sequence
  Immune stimulatory RNA
gggggguuuuuuuuuggggg

SEQ ID NO: 482 - RNA, 20 nt, Artificial Sequence
  Immune stimulatory RNA
gggggguuuuuuuuuugggg

SEQ ID NO: 483 - RNA, 20 nt, Artificial Sequence
  Immune stimulatory RNA
ggggguuuuuuuuuuugggg

SEQ ID NO: 484 - RNA, 20 nt, Artificial Sequence
  Immune stimulatory RNA
ggggguuuuuuuuuuuuggg

SEQ ID NO: 485 - RNA, 20 nt, Artificial Sequence
  Immune stimulatory RNA
gggguuuuuuuuuuuuuggg

SEQ ID NO: 486 - RNA, 20 nt, Artificial Sequence
  Immune stimulatory RNA
gggguuuuuuuuuuuuuugg

SEQ ID NO: 487 - RNA, 20 nt, Artificial Sequence
  Immune stimulatory RNA
gguuuuuuuuuuuuuuuugg

SEQ ID NO: 488 - RNA, 20 nt, Artificial Sequence
  Immune stimulatory RNA
guuuuuuuuuuuuuuuuuug

SEQ ID NO: 489 - RNA, 22 nt, Artificial Sequence
  Immune stimulatory RNA
gggggggggguuuggggggggg

SEQ ID NO: 490 - RNA, 22 nt, Artificial Sequence
  Immune stimulatory RNA
ggggggggguuuuggggggggg

SEQ ID NO: 491 - RNA, 22 nt, Artificial Sequence
  Immune stimulatory RNA
gggggggguuuuuugggggggg

SEQ ID NO: 492 - RNA, 22 nt, Artificial Sequence
  Immune stimulatory RNA
gggggggguuuuuuuggggggg

SEQ ID NO: 493 - RNA, 22 nt, Artificial Sequence
  Immune stimulatory RNA
ggggggguuuuuuuuggggggg

SEQ ID NO: 494 - RNA, 22 nt, Artificial Sequence
  Immune stimulatory RNA
ggggggguuuuuuuuugggggg

SEQ ID NO: 495 - RNA, 22 nt, Artificial Sequence
  Immune stimulatory RNA
ggggggguuuuuuuuuuggggg

SEQ ID NO: 496 - RNA, 22 nt, Artificial Sequence
  Immune stimulatory RNA
gggggguuuuuuuuuuuggggg

SEQ ID NO: 497 - RNA, 22 nt, Artificial Sequence
  Immune stimulatory RNA
gggggguuuuuuuuuuuugggg

SEQ ID NO: 498 - RNA, 22 nt, Artificial Sequence
  Immune stimulatory RNA
ggggguuuuuuuuuuuuugggg

SEQ ID NO: 499 - RNA, 22 nt, Artificial Sequence
  Immune stimulatory RNA
ggggguuuuuuuuuuuuuuggg

SEQ ID NO: 500 - RNA, 22 nt, Artificial Sequence
  Immune stimulatory RNA
ggguuuuuuuuuuuuuuuuggg

SEQ ID NO: 501 - RNA, 22 nt, Artificial Sequence
  Immune stimulatory RNA
gguuuuuuuuuuuuuuuuuugg

SEQ ID NO: 502 - RNA, 24 nt, Artificial Sequence
  Immune stimulatory RNA
ggggggggggguuugggggggggg

SEQ ID NO: 503 - RNA, 24 nt, Artificial Sequence
  Immune stimulatory RNA
gggggggggguuuugggggggggg

SEQ ID NO: 504 - RNA, 24 nt, Artificial Sequence
  Immune stimulatory RNA
ggggggggguuuuuuggggggggg

SEQ ID NO: 505 - RNA, 24 nt, Artificial Sequence
  Immune stimulatory RNA
ggggggggguuuuuuugggggggg

SEQ ID NO: 506 - RNA, 24 nt, Artificial Sequence
  Immune stimulatory RNA
gggggggguuuuuuuugggggggg

SEQ ID NO: 507 - RNA, 24 nt, Artificial Sequence
  Immune stimulatory RNA
gggggggguuuuuuuuuggggggg

SEQ ID NO: 508 - RNA, 24 nt, Artificial Sequence
  Immune stimulatory RNA
gggggggguuuuuuuuuugggggg

SEQ ID NO: 509 - RNA, 24 nt, Artificial Sequence
  Immune stimulatory RNA
ggggggguuuuuuuuuuugggggg

SEQ ID NO: 510 - RNA, 24 nt, Artificial Sequence
  Immune stimulatory RNA
ggggggguuuuuuuuuuuuggggg

SEQ ID NO: 511 - RNA, 24 nt, Artificial Sequence
  Immune stimulatory RNA
gggggguuuuuuuuuuuuuggggg

SEQ ID NO: 512 - RNA, 24 nt, Artificial Sequence
  Immune stimulatory RNA
gggggguuuuuuuuuuuuuugggg

SEQ ID NO: 513 - RNA, 24 nt, Artificial Sequence
  Immune stimulatory RNA
gggguuuuuuuuuuuuuuuugggg

SEQ ID NO: 514 - RNA, 24 nt, Artificial Sequence
  Immune stimulatory RNA
ggguuuuuuuuuuuuuuuuuuggg

SEQ ID NO: 515 - RNA, 32 nt, Artificial Sequence
  Immune stimulatory RNA
guuuuuuuuuuuuuuuuuuuuuuuuuuuuuug

SEQ ID NO: 516 - RNA, 34 nt, Artificial Sequence
  Immune stimulatory RNA
gguuuuuuuuuuuuuuuuuuuuuuuuuuuuuugg

SEQ ID NO: 517 - RNA, 36 nt, Artificial Sequence
  Immune stimulatory RNA
ggguuuuuuuuuuuuuuuuuuuuuuuuuuuuuuggg

SEQ ID NO: 518 - RNA, 37 nt, Artificial Sequence
  Immune stimulatory RNA
gggguuuuuuuuuuuuuuuuuuuuuuuuuuuuuuggg

SEQ ID NO: 519 - RNA, 39 nt, Artificial Sequence
  Immune stimulatory RNA
ggggguuuuuuuuuuuuuuuuuuuuuuuuuuuuuugggg

SEQ ID NO: 520 - RNA, 41 nt, Artificial Sequence
  Immune stimulatory RNA
gggggguuuuuuuuuuuuuuuuuuuuuuuuuuuuuuggggg

SEQ ID NO: 521 - RNA, 43 nt, Artificial Sequence
  Immune stimulatory RNA
ggggggguuuuuuuuuuuuuuuuuuuuuuuuuuuuuugggggg

SEQ ID NO: 522 - RNA, 45 nt, Artificial Sequence
  Immune stimulatory RNA
gggggggguuuuuuuuuuuuuuuuuuuuuuuuuuuuuuggggggg

SEQ ID NO: 523 - RNA, 47 nt, Artificial Sequence
  Immune stimulatory RNA
ggggggggguuuuuuuuuuuuuuuuuuuuuuuuuuuuuugggggggg

SEQ ID NO: 524-526 - skipped (3 entries)

SEQ ID NO: 527 - RNA, 10 nt, Artificial Sequence
  Immune stimulatory RNA
gguuuuuugg

SEQ ID NO: 528 - RNA, 11 nt, Artificial Sequence
  Immune stimulatory RNA
gguuuuuuugg

SEQ ID NO: 529 - RNA, 12 nt, Artificial Sequence
  Immune stimulatory RNA
gguuuuuuuugg

SEQ ID NO: 530 - RNA, 13 nt, Artificial Sequence
  Immune stimulatory RNA
gguuuuuuuuugg

SEQ ID NO: 531 - RNA, 14 nt, Artificial Sequence
  Immune stimulatory RNA
gguuuuuuuuuugg

SEQ ID NO: 532 - RNA, 15 nt, Artificial Sequence
  Immune stimulatory RNA
gguuuuuuuuuuugg

SEQ ID NO: 533 - RNA, 16 nt, Artificial Sequence
  Immune stimulatory RNA
gguuuuuuuuuuuugg

SEQ ID NO: 534 - RNA, 17 nt, Artificial Sequence
  Immune stimulatory RNA
gguuuuuuuuuuuuugg

SEQ ID NO: 535 - RNA, 18 nt, Artificial Sequence
  Immune stimulatory RNA
gguuuuuuuuuuuuuugg

SEQ ID NO: 536 - RNA, 19 nt, Artificial Sequence
  Immune stimulatory RNA
gguuuuuuuuuuuuuuugg

SEQ ID NO: 537 - skipped

SEQ ID NO: 538 - RNA, 10 nt, Artificial Sequence
  Immune stimulatory RNA
ggguuuuggg

SEQ ID NO: 539 - RNA, 11 nt, Artificial Sequence
  Immune stimulatory RNA
ggguuuuuggg

SEQ ID NO: 540 - RNA, 12 nt, Artificial Sequence
  Immune stimulatory RNA
ggguuuuuuggg

SEQ ID NO: 541 - RNA, 13 nt, Artificial Sequence
  Immune stimulatory RNA
ggguuuuuuuggg

SEQ ID NO: 542 - RNA, 14 nt, Artificial Sequence
  Immune stimulatory RNA
ggguuuuuuuuggg

SEQ ID NO: 543 - RNA, 15 nt, Artificial Sequence
  Immune stimulatory RNA
ggguuuuuuuuuggg

SEQ ID NO: 544 - RNA, 16 nt, Artificial Sequence
  Immune stimulatory RNA
ggguuuuuuuuuuggg

SEQ ID NO: 545 - RNA, 17 nt, Artificial Sequence
  Immune stimulatory RNA
ggguuuuuuuuuuuggg

SEQ ID NO: 546 - RNA, 18 nt, Artificial Sequence
  Immune stimulatory RNA
ggguuuuuuuuuuuuggg

SEQ ID NO: 547 - RNA, 19 nt, Artificial Sequence
  Immune stimulatory RNA
ggguuuuuuuuuuuuuggg

SEQ ID NO: 548 - RNA, 57 nt, Artificial Sequence
  Immune stimulatory RNA
ggguuuuuuuuuuuuuuuggguuuuuuuuuuuuuuuggguuuuuuuuuuuuuuuggg

SEQ ID NO: 549 - RNA, 42 nt, Artificial Sequence
  Immune stimulatory RNA
ggguuuuuuuuuuuuuuugggggguuuuuuuuuuuuuuuggg

SEQ ID NO: 550 - RNA, 51 nt, Artificial Sequence
  Immune stimulatory RNA
ggguuuggguuuggguuuggguuuggguuuggguuuggguuuggguuuggg

SEQ ID NO: 551 - RNA, 20 nt, Artificial Sequence
  Immune stimulatory RNA
gguuuuuuuuuuuuuuuggg

SEQ ID NO: 552 - RNA, 57 nt, Artificial Sequence
  Immune stimulatory RNA
cccuuuuuuuuuuuuuuucccuuuuuuuuuuuuuuucccuuuuuuuuuuuuuuuccc

SEQ ID NO: 553 - RNA, 51 nt, Artificial Sequence
  Immune stimulatory RNA
cccuuucccuuucccuuucccuuucccuuucccuuucccuuucccuuuccc

SEQ ID NO: 554 - RNA, 42 nt, Artificial Sequence
  Immune stimulatory RNA
cccuuuuuuuuuuuuuuuccccccuuuuuuuuuuuuuuuccc

SEQ ID NO: 555 - RNA, 60 nt, Artificial Sequence
  Immune stimulatory RNA
uagcgaagcucuuggaccuagguuuuuuuuuuuuuuugggugcguuccuagaaguacacg

SEQ ID NO: 556 - RNA, 120 nt, Artificial Sequence
  Immune stimulatory RNA
uagcgaagcucuuggaccuagguuuuuuuuuuuuuuugggugcguuccuagaaguacacgaucgcuucgagaaccuggauccaaaaaaaaaaaaaaacccacgcaaggaucuucaugugc

SEQ ID NO: 557 - RNA, 229 nt, Artificial Sequence
  Immune stimulatory RNA
gggagaaagcucaagcuuggagcaaugcccgcacauugaggaaaccgaguugcauaucucagaguauuggcccccguguagguuauucuugacagacaguggagcuuauucacucccaggauccgagucgcauacuacgguacuggugacagaccuaggucgucaguugaccaguccgccacuagacgugaguccgucaaagcaguuagauguuacacucuauuagauc

SEQ ID NO: 558 - RNA, 547 nt, Artificial Sequence
  Immune stimulatory RNA
gggagaaagcucaagcuuggagcaaugcccgcacauugaggaaaccgaguugcauaucucagaguauuggcccccguguagguuauucuugacagacaguggagcuuauucacucccaggauccgagucgcauacuacgguacuggugacagaccuaggucgucaguugaccaguccgccacuagacgugaguccgucaaagcaguuagauguuacacucuauuagaucucggauuacagcuggaaggagcaggaguaguguucuugcucuaaguaccgagugugcccaauacccgaucagcuuauuaacgaacggcuccuccucuuagacugcagcguaagugcggaaucuggggaucaaauuacugacugccuggauuacccucggacauauaaccuuguagcacgcuguugcuguauaggugaccaacgcccacucgaguagaccagcucucuuaguccggacaaugauaggaggcgcggucaaucuacuucuggcuaguuaagaauaggcugcaccgaccucuauaaguagcguguccucuag

SEQ ID NO: 559 - RNA, 1083 nt, Artificial Sequence
  Immune stimulatory RNA
gggagaaagcucaagcuuggagcaaugcccgcacauugaggaaaccgaguugcauaucucagaguauuggcccccguguagguuauucuugacagacaguggagcuuauucacucccaggauccgagucgcauacuacgguacuggugacagaccuaggucgucaguugaccaguccgccacuagacgugaguccgucaaagcaguuagauguuacacucuauuagaucucggauuacagcuggaaggagcaggaguaguguucuugcucuaaguaccgagugugcccaauacccgaucagcuuauuaacgaacggcuccuccucuuagacugcagcguaagugcggaaucuggggaucaaauuacugacugccuggauuacccucggacauauaaccuuguagcacgcuguugcuguauaggugaccaacgcccacucgaguagaccagcucucuuaguccggacaaugauaggaggcgcggucaaucuacuucuggcuaguuaagaauaggcugcaccgaccucuauaaguagcguguccucuagagcuacgcagguucgcaauaaaagcguugauuagugugcauagaacagaccucuuauucggugaaacgccagaaugcuaaauuccaauaacucuucccaaaacgcguacggccgaagacgcgcgcuuaucuuguguacguucucgcacauggaagaaucagcgggcauggugguagggcaauaggggagcuggguagcagcgaaaaagggccccugcgcacguagcuucgcuguucgucugaaacaacccggcauccguuguagcgaucccguuaucaguguuauucuugugcgcacuaagauucaugguguagucgacaauaacagcgucuuggcagauucuggucacgugcccuaugcccgggcuugugccucucaggugcacagcgauacuuaaagccuucaagguacucgacguggguaccgauucgugacacuuccuaagauuauuccacuguguuagccccgcaccgccgaccuaaacugguccaauguauacgcauucgcugagcggaucgauaauaaaagcuugaauu

SEQ ID NO: 560 - RNA, 229 nt, Artificial Sequence; identical to SEQ ID NO: 437
  Immune stimulatory RNA

SEQ ID NO: 561 - RNA, 546 nt, Artificial Sequence; identical to SEQ ID NO: 435
  Immune stimulatory RNA

SEQ ID NO: 562 - RNA, 547 nt, Artificial Sequence; identical to SEQ ID NO: 433
  Immune stimulatory RNA

SEQ ID NO: 563 - RNA, 1083 nt, Artificial Sequence; identical to SEQ ID NO: 436
  Immune stimulatory RNA

SEQ ID NO: 564 - RNA, 59 nt, Artificial Sequence
  Immune stimulatory RNA
uagcgaagcucuuggaccuaccuuuuuuuuuuuuuucccugcguuccuagaaguacacg

SEQ ID NO: 565 - RNA, 120 nt, Artificial Sequence
  Immune stimulatory RNA
uagcgaagcucuuggaccuaccuuuuuuuuuuuuuuucccugcguuccuagaaguacacgaucgcuucgagaaccuggauggaaaaaaaaaaaaaaagggacgcaaggaucuucaugugc

SEQ ID NO: 566 - protein, 9 aa, Artificial Sequence
  cationic component of the polymeric carrier
CRRRRRRRC

SEQ ID NO: 567 - protein, 10 aa, Artificial Sequence
  cationic component of the polymeric carrier
CRRRRRRRRC

SEQ ID NO: 568 - protein, 11 aa, Artificial Sequence
  cationic component of the polymeric carrier
CRRRRRRRRRC

SEQ ID NO: 569 - protein, 12 aa, Artificial Sequence
  cationic component of the polymeric carrier
CRRRRRRRRRRC

SEQ ID NO: 570 - protein, 13 aa, Artificial Sequence
  cationic component of the polymeric carrier
CRRRRRRRRRRRC

SEQ ID NO: 571 - protein, 15 aa, Artificial Sequence
  cationic component of the polymeric carrier
CRRRRRRRRRRRRRC

SEQ ID NO: 572 - protein, 16 aa, Artificial Sequence
  cationic component of the polymeric carrier
CRRRRRRRRRRRRRRC

SEQ ID NO: 573 - protein, 17 aa, Artificial Sequence
  cationic component of the polymeric carrier
CRRRRRRRRRRRRRRRC

SEQ ID NO: 574 - protein, 18 aa, Artificial Sequence
  cationic component of the polymeric carrier
CRRRRRRRRRRRRRRRRC

SEQ ID NO: 575 - protein, 19 aa, Artificial Sequence
  cationic component of the polymeric carrier
CRRRRRRRRRRRRRRRRRC

SEQ ID NO: 576 - protein, 20 aa, Artificial Sequence
  cationic component of the polymeric carrier
CRRRRRRRRRRRRRRRRRRC

SEQ ID NO: 577 - protein, 21 aa, Artificial Sequence
  cationic component of the polymeric carrier
CRRRRRRRRRRRRRRRRRRRC

SEQ ID NO: 578 - protein, 22 aa, Artificial Sequence
  cationic component of the polymeric carrier
CRRRRRRRRRRRRRRRRRRRRC

SEQ ID NO: 579 - protein, 14 aa, Artificial Sequence
  cationic component of the polymeric carrier
CRRRRRRRRRRRRC

SEQ ID NO: 580 - protein, 13 aa, Artificial Sequence
  cationic component of the polymeric carrier
CRRRRRRRRRRRR

SEQ ID NO: 581 - protein, 8 aa, Artificial Sequence
  cationic component of the polymeric carrier
CRRRRRRR

SEQ ID NO: 582 - protein, 9 aa, Artificial Sequence
  cationic component of the polymeric carrier
CRRRRRRRR

SEQ ID NO: 583 - protein, 10 aa, Artificial Sequence
  cationic component of the polymeric carrier
CRRRRRRRRR

SEQ ID NO: 584 - protein, 11 aa, Artificial Sequence
  cationic component of the polymeric carrier
CRRRRRRRRRR

SEQ ID NO: 585 - protein, 12 aa, Artificial Sequence
  cationic component of the polymeric carrier
CRRRRRRRRRRR

SEQ ID NO: 586 - protein, 14 aa, Artificial Sequence
  cationic component of the polymeric carrier
CRRRRRRRRRRRRR

SEQ ID NO: 587 - protein, 15 aa, Artificial Sequence
  cationic component of the polymeric carrier
CRRRRRRRRRRRRRR

SEQ ID NO: 588 - protein, 16 aa, Artificial Sequence
  cationic component of the polymeric carrier
CRRRRRRRRRRRRRRR

SEQ ID NO: 589 - protein, 17 aa, Artificial Sequence
  cationic component of the polymeric carrier
CRRRRRRRRRRRRRRRR

SEQ ID NO: 590 - protein, 18 aa, Artificial Sequence
  cationic component of the polymeric carrier
CRRRRRRRRRRRRRRRRR

SEQ ID NO: 591 - protein, 19 aa, Artificial Sequence
  cationic component of the polymeric carrier
CRRRRRRRRRRRRRRRRRR

SEQ ID NO: 592 - protein, 20 aa, Artificial Sequence
  cationic component of the polymeric carrier
CRRRRRRRRRRRRRRRRRRR

SEQ ID NO: 593 - protein, 21 aa, Artificial Sequence
  cationic component of the polymeric carrier
CRRRRRRRRRRRRRRRRRRRR

SEQ ID NO: 594 - RNA, 1621 nt, Artificial Sequence
  SP_Ipilimumab-HC
gggagaaagcuuaccauggagcugggccucagcuggaucuuccugcuggccauccucaagggggugcagugccaggugcagcuggucgagagcggcgggggcguggugcagcccgggcgcucccuccggcugagcugcgccgccuccggcuucaccuucagcuccuacaccaugcacuggguccgccaggcgccggggaagggccuggagugggugacguucaucagcuacgacggcaacaacaaguacuacgccgacuccgugaaggggcgguucaccaucagccgcgacaacuccaagaacacccucuaccugcagaugaacagccugcgggccgaggacaccgccaucuacuacugcgcccgcacgggcuggcucgggcccuucgacuacuggggccaggggacccuggucaccguguccagcgcguccaccaagggccccagcguguucccccuggccccguccagcaaguccacgagcggcgggaccgccgcccucggcugccuggucaaggacuacuuccccgagcccgugaccguguccuggaacagcggggcgcugaccagcggcguccacacguuccccgccgugcuccaguccagcggccuguacucccugagcuccguggucaccgugccgagcuccagccucgggacccagaccuacaucugcaacgugaaccacaagcccuccaacacgaaggucgacaagcggguggagcccaagagcugcgacaagacccacacgugcccgcccugccccgcccccgagcugcugggcgggcccuccguguuccucuucccgcccaagcccaaggacacccugaugaucagccgcacccccgaggugaccugcgucguggucgacgugucccacgaggacccggaggucaaguucaacugguacguggacggcguggagguccacaacgccaagaccaagccccgggaggagcaguacaacagcaccuaccgcgugguguccguccugacggugcuccaccaggacuggcugaacgggaaggaguacaagugcaaggugagcaacaaggcccugcccgcgcccaucgagaagaccaucuccaaggccaagggccagccgcgggagccccaggucuacacccucccgcccagccgcgacgagcugaccaagaaccaggugucccugacgugccucgugaagggcuucuaccccagcgacaucgccgucgagugggagagcaacgggcagcccgagaacaacuacaagaccacgcccccggugcuggacuccgacggcagcuucuuccuguacuccaagcucaccguggacaagagccgguggcagcaggggaacgucuucuccugcagcgugaugcacgaggcccugcacaaccacuacacccagaagucccugagccucucccccggcaagugaggacuaguuauaagacugacuagcccgaugggccucccaacgggcccuccuccccuccuugcaccgagauuaauaaaaaaaaaaaaaaaaaaaaaaaaaaaaaaaaaaaaaaaaaaaaaaaaaaaaaaaaaaaaaaaaugcaucccccccccccccccccccccccccccccccaaaggcucuuuucagagccaccagaauu

SEQ ID NO: 595 - RNA, 925 nt, Artificial Sequence
  SP_Ipilimumab-LC
gggagaaagcuuaccauggagacccccgcccagcugcucuuccugcugcuccuguggcugccggacaccacgggcgagaucgugcugacccagagccccggcacccucucccugagcccgggggagcgcgccacgcuguccugccgggccagccaguccgucggcagcuccuaccucgcgugguaccagcagaagcccgggcaggcgccccgccugcugaucuacggcgccuucagccgggccaccgggauccccgaccgcuucuccggcagcggcuccgggaccgacuucacccucacgaucagccggcuggagccggaggacuucgccguguacuacugccagcaguacggcuccagccccuggaccuucgggcagggcaccaagguggagaucaagcgcaccgucgccgcccccuccguguucaucuucccgcccagcgacgagcagcugaaguccgggacggccagcguggucugccuccugaacaacuucuacccccgggaggccaaggugcaguggaagguggacaacgcgcugcaguccggcaacagccaggagagcgucaccgagcaggacuccaaggacagcaccuacucccucagcuccacccugacgcugagcaaggccgacuacgagaagcacaagguguacgccugcgaggugacccaccagggccucuccagccccgucaccaaguccuucaaccgcggggagugcugaggacuaguuauaagacugacuagcccgaugggccucccaacgggcccuccuccccuccuugcaccgagauuaauaaaaaaaaaaaaaaaaaaaaaaaaaaaaaaaaaaaaaaaaaaaaaaaaaaaaaaaaaaaaaaaaugcaucccccccccccccccccccccccccccccccaaaggcucuuuucagagccaccagaauu

SEQ ID NO: 596 - RNA, 1003 nt, Artificial Sequence; identical to SEQ ID NO: 165
  Hs_CD40LG_v1(GCv3).1

SEQ ID NO: 597 - RNA, 667 nt, Artificial Sequence; identical to SEQ ID NO: 156
  PDCD1(21-150)

SEQ ID NO: 598 - RNA, 1849 nt, Artificial Sequence
  IL12B(1-328)_Linker_IL12A(23-219)
gggagaaagcuuaccaugugccaccagcagcuggugaucagcugguucucccucgucuuccuggccagcccccugguggccaucugggagcucaagaaggacguguacgucguggagcuggacugguacccggacgcgcccggcgagauggugguccugaccugcgacacccccgaggaggacgggaucacguggacccucgaccaguccagcgaggugcugggcuccgggaagacccugaccauccaggugaaggaguucggcgacgccgggcaguacacgugccacaagggcggcgagguccucagccacucccugcugcuccugcacaagaaggaggacgggaucuggagcaccgacauccugaaggaccagaaggagcccaagaacaagaccuuccuccgcugcgaggccaagaacuacuccggccgguucacgugcugguggcugaccaccaucagcaccgaccugaccuucuccgucaagagcucccgcgggagcuccgacccgcagggcgugacgugcggggccgccacccucagcgcggagcgggugcgcggcgacaacaaggaguacgaguacuccguggagugccaggaggacagcgccugccccgccgccgaggagucccugcccaucgaggugauggucgacgcggugcacaagcugaaguacgagaacuacaccagcagcuucuucauccgggacaucaucaagcccgacccgcccaagaaccuccagcugaagccccugaagaacucccgccagguggaggucagcugggaguaccccgacaccugguccacgccgcacagcuacuucucccucaccuucugcguccaggugcagggcaagagcaagcgggagaagaaggaccgcguguucaccgacaagaccuccgccacggugaucugccggaagaacgccagcaucuccgugcgcgcccaggaccgguacuacagcuccagcugguccgagugggccagcguccccugcuccggcaguacuucgggcagugguaagccugguaguggugaggguaguacuaagggucggaaccugccgguggccacccccgaccccggcauguuccccugccugcaccacagccagaaccuccugcgcgccguguccaacaugcugcagaaggcccggcagacgcucgaguucuacccgugcaccagcgaggagaucgaccacgaggacaucaccaaggacaagaccuccacggucgaggccugccugccccuggagcucaccaagaacgagagcugccugaacucccgcgagaccagcuucaucaccaacggguccugccuggcgagccggaagacguccuucaugauggcccucugccugagcuccaucuacgaggaccugaagauguaccagguggaguucaagaccaugaacgccaagcuccugauggaccccaagcgccagaucuuccuggaccagaacaugcucgccgugaucgacgagcugaugcaggcgcugaacuucaacagcgagaccgucccccagaaguccagccucgaggagccggacuucuacaagaccaagaucaagcugugcauccugcuccacgccuuccggauccgcgccgugacgaucgaccgggugauguccuaccugaacgccagcugaggacuaguuauaagacugacuagcccgaugggccucccaacgggcccuccuccccuccuugcaccgagauuaauaaaaaaaaaaaaaaaaaaaaaaaaaaaaaaaaaaaaaaaaaaaaaaaaaaaaaaaaaaaaaaaaugcaucccccccccccccccccccccccccccccccaaaggcucuuuucagagccaccagaauu

SEQ ID NO: 599 - RNA, 867 nt, Artificial Sequence
  PDCD1
augcaaaucccccaagcccccuggcccguaguaugggccguacuccagcucggcuggcgacccggcugguuccucgacucccccgaccgccccuggaacccacccacauucucacccgcacuacucguagucaccgaaggcgacaacgccaccuucaccugcuccuucuccaacaccucggaauccuuuguacucaacugguaccgcaugagcccguccaaccaaaccgacaaacucgccgcauuccccgaagaccgcagccaacccggacaagacugccgauuccgcgucacccaacuaccuaacgguagagacuuccacaugucagucguccgcgcccgccgaaacgacuccgguaccuaccuaugcggagccauaucccuugcccccaaagcacaaaucaaagaaucccuacgagccgaacuccgagucaccgaacgccgagccgaagucccaaccgcacaccccucccccuccccccgaccagccggccaauuccaaacccuaguagucggcguaguaggcggccuccuaggcucacucguacuccucgucuggguacuagcagucaucugcucacgagccgcccgaggcaccaucggagcccgacgaaccggccaaccacucaaagaagaccccuccgccguaccagucuucucagucgacuacggugaacucgacuuucaauggagagaaaaaacccccgaacccccaguccccugcguccccgaacaaaccgaauacgccacaaucgucuucccaucaggcaugggcaccucaucccccgcccgccgaggcuccgccgacggaccccgcuccgcccaaccccuccgacccgaagacggccacugcuccuggccccucuaa

SEQ ID NO: 600 - RNA, 450 nt, Artificial Sequence
  PDCD1(1-149)
augcaaaucccccaagcccccuggcccgucgucugggccguccuccaacucggcuggcgacccggcugguuccucgacucccccgaccgccccuggaacccucccaccuucucccccgcccuccucgucgucaccgaaggcgacaacgccaccuucacaugcuccuucuccaacaccuccgaauccuucguccucaacugguaccgcaugucccccuccaaccaaaccgacaaacucgccgccuuccccgaagaccgcucacaacccggccaagacugccgcuuccgagucacccaacuacccaacggccgcgacuuccacauguccgucguccgcgcccgacgcaacgacuccggcaccuaccuaugcggcgccaucucccucgcccccaaagcccaaaucaaagaaucccuccgcgccgaacuacgugucaccgaacgccgagccuaa

SEQ ID NO: 601 - RNA, 660 nt, Artificial Sequence
  IL12A
augugccccgcccgcucccuccuccucgucgccacacucguccuccucgaucaccucucacucgcacgaaaccuaccagucgccacccccgaccccggcauguuccccugccuccaccacucccaaaaccuccuccgcgccgucuccaauaugcuccaaaaagcccgccaaacccucgaauucuaccccugcacauccgaagaaaucgaccacgaagacaucaccaaagacaaaaccuccaccgucgaagccugccucccccuugaacucaccaaaaacgaauccugccuaaacucacgcgaaaccuccuucaucaccaacggaucaugccucgccucccgcaaaaccuccuucaugauggcccucugccucuccuccaucuacgaagaccucaaaauguaccaaguagaauucaaaaccaugaacgccaaacuccucauggaccccaaacgccaaaucuuccucgaccaaaacaugcucgccgucaucgacgaacucaugcaagcccucaacuucaacucagaaaccgucccccaaaaaucaucccucgaagaacccgacuucuacaaaaccaaaaucaaacuaugcaucuuacuccacgccuuccggaucagagcagucaccaucgaccgcgucauguccuaccuaaacgccuccuaa

SEQ ID NO: 602 - RNA, 657 nt, Artificial Sequence
  IL12A(1-219)
augugccccgcccgcucucuccuccucguagcaacccucguccuccucgaccaccucucccuagcccgaaaccuccccgucgccacccccgacccaggcauguuccccugccuccaccacucccaaaaccuccuccgagccgucuccaacaugcuccaaaaagcccgccaaacccucgaauucuaccccugcaccuccgaagaaaucgaccacgaagacaucaccaaagacaaaaccuccaccgucgaagccugccucccccucgaacucaccaaaaacgaaucaugccucaacucccgcgaaaccuccuucaucaccaacggcuccugccuagccucccgcaaaaccuccuucaugauggcccucugccucucauccaucuacgaagaccuaaaaauguaccaagucgaauucaaaaccaugaacgccaaacuccucauggacccaaaacgccaaaucuuccuagaccaaaacaugcucgccgucaucgacgaacucaugcaagcccucaacuucaacuccgaaaccguaccccaaaaauccucacucgaagaacccgacuucuacaaaacaaaaaucaaacucugcauacuccuccacgccuuccgcauccgcgccgucaccaucgaucgagucauguccuaccucaacgccucc

SEQ ID NO: 603 - RNA, 594 nt, Artificial Sequence
  IL12A(23-219)
cgcaaccuccccgucgccacccccgaccccggcauguuccccugccuccaccacucccaaaaucuccuccgcgccgucuccaacaugcuccaaaaagcccgccaaacccucgaauucuaccccugcacguccgaagaaaucgaccacgaagacaucaccaaagacaaaaccuccaccgucgaagccugccucccccucgaacucaccaaaaacgaauccugccucaacucacgcgaaaccuccuucaucaccaacggcucaugccucgccucacgaaaaaccuccuucaugauggcccucugccucuccucaaucuacgaagaccucaaaauguaccaagucgaauucaaaaccaugaacgccaaacuccucauggaccccaaacgccaaaucuuccucgaccaaaacaugcucgcagucaucgacgaacucaugcaagcccucaacuucaacuccgaaaccgucccccaaaaaucaucccucgaagaaccagacuucuacaaaaccaaaaucaaacucugcauccuccuccacgccuuccgcauccgcgccguaaccaucgaccgcgucaugucauaccucaacgccuccuaa

SEQ ID NO: 604 - RNA, 987 nt, Artificial Sequence
  IL12B
augugccaccaacaacucgucaucuccugguucucccucgucuuccucgccucuccccucgucgccauaugggaacucaagaaggacgucuacguaguagaacucgacugguacccagacgcccccggagaaauggugguccucaccugcgacacccccgaagaagacggcaucaccuggacauuagaccaaucguccgaaguucucggcuccggcaaaacacucacaauccaaguaaaagaauucggcgacgccggacaauacaccugccacaaaggcggagaaguacuaucccacucacuccuacuccuacacaaaaaagaagacggcauauggagcaccgacauccucaaagaccaaaaagaacccaaaaacaaaaccuuccuccgaugcgaagccaaaaacuacuccggccgcuucaccugcugguggcucaccacaauauccaccgaccucaccuucuccgucaaaucaucucgcggcuccagcgacccccaaggcgucaccugcggcgccgccacccucucagccgaacgcguacgcggugacaacaaagaauacgaauacagcguagaaugccaagaagacuccgccugucccgccgcagaagaaucacuccccaucgaagucaugguagacgcaguacacaaacucaaauacgaaaacuacaccuccuccuucuucauccgcgacaucaucaaacccgaccccccaaaaaaccuacaacucaaaccccuuaaaaacucccgccaagucgaagucuccugggaauacccagacacaugguccaccccccacuccuacuucucccucaccuucugcguccaaguccaaggcaaauccaaacgcgaaaaaaaagaccgaguauucaccgacaaaaccucagccaccgucaucugcagaaaaaacgccuccaucuccguccgagcccaagaccgcuacuacuccuccuccugguccgaaugggcauccguccccugcucauaa

SEQ ID NO: 605 - RNA, 984 nt, Artificial Sequence
  IL12B(1-328)
augugccaccaacaacucgucaucagcugguucagccucgucuuccucgccuccccccuaguagccauaugggaacuaaaaaaagacguauacguuguagaacuagacugguaccccgacgcacccggcgaaauggucguccucaccugcgacacccccgaagaagauggcauaacauggacccucgaccaauccucagaaguccucggcuccggcaaaacccucacaauccaagucaaagaauucggcgacgccggccaauacaccugccacaaaggcggcgaaguccucucucacucucuccuccuccuccacaaaaaagaagacggcaucugguccaccgacauacucaaagaccaaaaagaacccaaaaacaaaaccuuccugcgaugcgaagccaaaaacuacuccggccgauucacaugcugguggcucaccaccaucucaaccgaccucaccuucuccgucaaauccucccguggcagcuccgacccccaaggagucaccugcggcgcagccacccucuccgccgaacgcgucagaggcgacaacaaagaauacgaauacuccgucgaaugccaagaggacuccgccugccccgccgccgaagaaucacuccccaucgaagucaugguagacgccguacacaaacuaaaauacgaaaacuacaccucuucauucuucauccgagacaucaucaaacccgacccccccaaaaaccuccaacucaaaccccucaaaaacucccgacaagucgaagucagcugggaauacccagacaccugguccaccccacacuccuacuucucacuaaccuucugcguccaaguccaaggcaaaucgaaacgcgaaaaaaaagacagagucuucaccgacaaaaccucagccaccgucaucugccgaaaaaacgcaucaaucagcguccgcgcccaagaccgcuacuacuccuccagcuggagcgaaugggcauccguccccugcucc

SEQ ID NO: 606 - RNA, 921 nt, Artificial Sequence
  IL12B(23-328)
aucugggaacucaaaaaagacgucuacguagucgaacucgacugguacccagacgcccccggcgaaauggucguccucaccugcgacacacccgaagaagacggcaucaccuggacacucgaccaauccuccgaaguacucggcuccggcaaaacccucacaauccaagucaaagaauucggcgacgccggccaauacaccugccacaaaggcggcgaaguccucucccacucccuccuccuacuccacaaaaaagaagacggcaucugguccacagacauccucaaagaccagaaagaacccaaaaacaagaccuuccuacgaugcgaagccaaaaacuacagcggccgauucaccugcugguggcucacaaccaucagcaccgaccuaaccuucuccguaaaauccuccagaggauccagcgacccccaaggcgucacaugcggcgccgcaacccuauccgcagagcgaguacgaggcgacaacaaagaauacgaauacuccguagaaugccaagaagacuccgcaugcccugccgccgaagaaagccuccccaucgaagucauggucgacgcaguccacaaacucaaauacgaaaacuacacaagcucuuucuucauacgcgacaucaucaaacccgaccccccaaaaaaccuacaacucaaaccccuaaaaaacucccggcaagucgaagucagcugggaauaccccgacaccugguccaccccccauuccuacuucucccucacauucugcguacaaguccaaggcaaaaguaaacgcgagaaaaaagaccgcgucuucaccgacaaaaccagcgcaaccgucaucugccgcaaaaacgccagcaucagcguacgagcccaagaccgcuacuacucaagcucaugguccgaaugggccuccguccccugcucauaa

SEQ ID NO: 607 - RNA, 54 nt, Artificial Sequence; identical to SEQ ID NO: 130
  Linker-sFvCC49-218

SEQ ID NO: 608 - RNA, 1632 nt, Artificial Sequence
  IL12
augugccaccaacaacucgugaucuccugguucucccucguuuuccucgcaucaccccucguugcuauaugggaacucaagaaagacgucuacgucgucgaacucgacugguacccggacgcccccggcgaaauggucguccuaaccugcgauacacccgaagaagacggcaucaccuggacccucgaccaguccucugaaguccuaggauccggcaaaacccuuacaauccaagucaaagaguucggcgacgccggccaguacacaugccacaaaggcggcgagguccugagccauuccuuacuccuccuacacaagaaagaagacggcaucugguccaccgacauacuaaaagaccaaaaagaacccaaaaacaaaaccuuccuacgaugcgaagccaaaaacuacucaggccgauucaccuguugguggcucaccacgaucagcaccgaccuaacauucucaguaaaauccucacgcggcuccagcgacccacaaggcgucacaugcggggccgccacccuauccgccgaacgagucaggggcgacaacaaagaauacgaauacagcguagaaugccaagaagacuccgccugccccgcggccgaagagucccuacccauagaggucauggucgacgccguccacaaacucaaauacgagaacuacaccuccagcuucuucauccgcgacauaaucaaaccagacccacccaaaaaccuacaacuaaaaccacucaaaaauucgcgccaggucgaagucucuugggaauacccggacaccuggucaaccccacacuccuacuucagccuaaccuucugcguccaaguccaaggcaaauccaaacgcgaaaagaaagaccgaguauucacagacaaaaccucagcaacgguaaucugccgcaaaaacgccuccaucucagucagggcccaagaccgauacuacuccuccucauggagcgagugggcaucuguaccaugcagcgggagcacauccggauccggaaaacccggcuccggcgaaggaagcaccaaagguagaaaccuuccaguagccacccccgacccugguauguuucccugccuccaccauagccaaaaccuccuacgagcagucuccaacaugcuccaaaaagcacgacaaacccuugaguucuacccaugcacauccgaagaaauagaccacgaagacaucacaaaggacaaaaccuccacagucgaagccugccucccacuugaacucaccaaaaacgaaucaugccuaaacucccgcgaaaccucuuucaucaccaauggaucaugccucgcaucccgcaaaacaucguucaugauggcacucugccugucaagcaucuacgaagaccucaaaauguaccaaguugaguucaagacaaugaacgcaaaacuccucauggacccuaaacgccaaauauuccucgaccaaaacaugcucgccgugauagacgaacucaugcaagcacuaaacuucaacagcgaaacagucccccaaaaauccagccucgaagaacccgacuucuacaaaaccaaaaucaaacuaugcauccuccuccacgccuucagaaucagggccgugaccaucgacagagucauguccuaccucaacgccucguaa

SEQ ID NO: 609 - RNA, 786 nt, Artificial Sequence
  CD40LG
augaucgaaacauacaaccaaacauccccccgauccgccgcaacaggccuccccaucuccaugaaaauauucauguaccuccucacaguauuccucauaacccaaaugaucggaucagcacuauucgccgucuaccuccaccgccgccucgacaaaaucgaagacgaacgcaaccuccacgaagacuucgucuucaugaaaaccauccaacgcugcaacaccggagaacgaucccuaucccuccucaacugcgaagagaucaaaucccaauucgaaggcuucgucaaagacaucaugcucaacaaagaagaaaccaaaaaagaaaacuccuucgaaaugcaaaaaggcgaccaaaacccccaaaucgccgcccacgucaucuccgaagccuccuccaaaacaaccuccguucuccaaugggccgagaaaggcuacuacacuauguccaacaaccucgucacccucgaaaacggcaaacaacucaccgucaaacgccaaggccucuacuacaucuacgcccaagucacauucugcuccaaccgcgaagcauccagccaagcccccuucaucgccucacucugccucaaaucccccggccgauucgaacgcauccuccuacgcgccgccaacacccacuccucagccaaacccugcggccaacaauccauccaccuaggcggcgucuucgaacuccaacccggugccuccgucuuugucaacguaaccgaccccucccaagucucccacggcaccggauucacauccuucggccuccucaaacucuaa

SEQ ID NO: 610 - RNA, 867 nt, Artificial Sequence
  PDCD1
augcagauaccacaagcaccauggccaguaguaugggcaguauuacaauuaggauggagaccaggaugguuuuuagacucaccagauagaccauggaauccaccaacauuuucaccagcauuauuagucguaacagaaggagacaaugcaacauuuacauguucauuuucaaauacaucagaaucuuuuguauuaaauugguauagaaugucaccaaguaaucaaacagauaaauuagcagcauuuccagaagauagaucacaaccaggacaagauuguagauuuagaguaacacaauuaccuaaugguagagauuuucauaugucaguaguaagagcaagacgaaaugauagcggaacauauuuauguggagcaauaucauuagcaccaaaagcacaaauaaaagaaaguuuaagagcagaacuaagaguaacagaaagaagagcagaaguaccaacagcacauccaucuccaaguccaagaccagcaggacaauuucaaacauuaguaguuggaguaguaggaggacuacuaggaucauuaguauuacuaguauggguacuagcuguaauauguucaagagcagcaagaggaacaauaggugcaagaagaacaggacaaccacuuaaagaagacccuucagccguaccuguauuuaguguagauuauggagaauuagauuuccaauggagagaaaaaacaccagaaccaccuguaccaugcguaccagaacaaacagaauacgcaacaauaguuuucccaucaggaaugggaacuagcucacccgcaagaagaggaucagcagauggaccaagaucagcacaaccacuaagacccgaagauggacauuguucauggccauuauaa

SEQ ID NO: 611 - RNA, 450 nt, Artificial Sequence
  PDCD1(1-149)
augcaaauaccccaagcaccauggccaguaguaugggcaguauuacaacuaggauggagaccaggaugguucuuagacucaccagacagaccauggaacccaccaacauucucaccagcacuauuaguaguaacagaaggagacaacgcaacauucacaugcucauucucaaacacaucagaaucauucguauuaaacugguacagaaugucaccaucaaaccaaacagacaaacuagcagcauucccagaagacagaucacaaccaggacaagacugcagauucagaguaacacaacuaccaaacggaagagacuuccacaugucaguaguaagagcaagaagaaacgacucaggcaccuaccuaugcggagcaauaucacuagcaccaaaagcacaaauaaaagaaucacuaagagcagaacuaagaguaacagaaagacgagcauaa

SEQ ID NO: 612 - RNA, 660 nt, Artificial Sequence
  IL12A
augugcccagcaagaucacuacuacuaguagcaacacuaguacuacuagaccaccuaucccuagcacgaaaccuaccaguagcaacaccugacccaggaauguucccaugccuccaccacucccaaaaccuauuacgagcagucucaaacaugcuacaaaaagcacgacaaacacuagaauucuacccaugcacaucagaagaaauagaccacgaagacauaacaaaagacaaaacaucaacaguagaagcaugccuaccacuagaacucacaaaaaacgaaucaugccuaaacucuagagaaacaucauucauaacaaacggaucaugccuagccuccagaaaaacaucauucaugauggccuuaugccuaucaucaauauaugaagaccuaaaaauguaccaagucgaauucaaaacaaugaacgcaaaacuacuaauggacccaaaaagacaaauauuccuagaccaaaacaugcucgcaguaauagaugaacuaaugcaagcacuaaacuucaacucagaaaccgucccccaaaaauccucacuagaagaacccgacuucuacaaaacaaaaauaaaauuaugcauacuauuacacgcauuuagaauaagagcaguaacaauagacagaguaaugucauaccuaaacgcauccuaa

SEQ ID NO: 613 - RNA, 657 nt, Artificial Sequence
  IL12A(1-219)
augugcccagcaagaucauuacuacuaguagccacacuaguccuccuagaccaccuaucacuagcaagaaaccuaccaguagcaacaccagacccaggaauguucccaugccuacaccacucacaaaacuuacuaagagcaguaucaaacaugcuacaaaaagcaagacaaacacuagaauucuacccaugcacaucagaagaaauagaucaugaagacauaacaaaagacaaaacauccacaguagaagcaugccuaccacuagaacuaacaaaaaacgaaucaugccuaaacucacgagaaaccucauucauaacaaacggaucaugccuagcaucacgaaaaaccucauucaugauggcacuaugccuaucauccauauacgaagaccuaaaaauguaccaaguagaauucaaaacaaugaacgcaaaacuccucauggacccaaaaagacaaauauuccuagaccaaaacaugcuagcaguuauagacgaacuaaugcaagcacuaaacuucaacucagaaaccguaccacaaaaaucaucacuagaagaaccagacuuuuacaaaaccaaaauaaaacuaugcauacuacuacacgcauucagaauaagagcaguaacaauagacagaguaaugucuuaccuaaacgcauca

SEQ ID NO: 614 - RNA, 594 nt, Artificial Sequence
  IL12A(23-219)
agaaaccuaccaguagcaacacccgacccaggaauguucccaugccuacaccacucacaaaaccuacuacgcgcaguaucaaacauguuacaaaaagcacgacaaacacuugaauucuaccccugcacaucagaagaaauagaccacgaagacauaacaaaagacaaaacauccaccguagaagcaugccucccacuagaacuaacaaaaaacgaaucaugccuaaacucaagagaaacaucauucauaacaaacggaucaugccuagcaucacgaaaaacaucauucaugauggcacuaugccuauccuccauauacgaagaccuaaaaauguaccaaguagaauucaaaacaaugaacgcaaaacuacuaauggacccaaaaagacaaauauuccuagaccaaaacaugcucgcaguaauagacgaacuaaugcaagcacuaaacuuuaacucagaaacaguaccccaaaaaucaucacuagaagaaccagacuucuacaaaacaaaaauaaaauuaugcauacuccuacacgcauucagaaucagagcaguaacaauagaccgcguaaugucauaccuaaacgcaucauaa

SEQ ID NO: 615 - RNA, 987 nt, Artificial Sequence
  IL12B
augugccaucaacaacuaguaaucucaugguucagccuaguauucuuagccaguccauuaguagcaauaugggaauuaaaaaaagauguauacguuguggaacuagacugguauccugacgcaccaggagaaaugguuguacuaacaugugauacacccgaagaagacggaauaacauggacacuagaccaaucaucagaaguauuaggcucaggaaaaacauuaacaauacaaguaaaagaauucggagacgccggacaauacacaugccacaaaggaggcgaaguauuaucacauucauuauuacuacuacacaaaaaagaagacggcaucuggucaacagacauauuaaaagaccaaaaagaaccuaaaaacaaaacauucuuaagaugcgaagcaaaaaacuacaguggaagauucacaugcugguggcugacaacaauaucaacagaucuaacauuuucaguaaaaucaucaagaggaucaucagauccacaaggcguaacaugcggagccgcaacacuaagcgcagaaagagucagaggagacaacaaagaauacgaauauucaguagaaugucaagaagauucagcaugcccugcagcagaagaaucacuaccaauagaagucaugguagaugcaguacacaaacuaaaauaugaaaacuacacaucaagcuucuuuauaagagacauaaucaaaccagacccaccaaaaaaccuacaacuaaaaccauuaaaaaacucacgacaaguagaaguaagcugggaauacccagacacguggucgaccccacacucauacuucagcuuaacauuuugcguacaaguacaaggaaaaucaaaaagagaaaaaaaagaccgaguauuuacagacaaaacaucugcaacaguaauaugccgaaaaaacgcaucaauaucuguaagagcacaagacagauauuacucaucaucauggagugaaugggcaagcguaccaugcucauaa

SEQ ID NO: 616 - RNA, 984 nt, Artificial Sequence
  IL12B(1-328)
augugccaucaacaacuaguaauaucaugguucucacuaguauucuuagcaaguccccuaguagcaauaugggaacuaaaaaaagacgucuacguuguagaauuagacugguacccagacgcaccaggcgaaaugguaguacuaacaugcgauacaccagaagaagacggaauaacauggacacuagaccaaucaucagaaguucuaggaucaggaaaaacauuaacaauacaaguaaaagaauucggggacgcaggacaauauacaugccacaaaggaggagaaguuuuaucacacucacuacuauuauuacacaaaaaagaagacggaauauggucaacugacauacuaaaagaucaaaaagaaccaaaaaacaaaacauucuuaagaugugaagcaaaaaauuacaguggaagauucacaugcugguggcuaacaacaauaaguacagaccuaacauuuucaguaaaaucaaguagaggaucaucagacccacaaggcguaacauguggagcagcaacacuaucagcagaacgagucagaggagacaacaaagaauacgaauacuccguagaaugccaagaagacagugcaugccccgcagccgaagaaucauuaccaauagaaguaaugguagacgcaguacacaaacuaaaauacgaaaacuacacaagcucauucuuuauacgagauauaauaaaaccagacccaccaaaaaaccuacaacuaaaaccacuaaaaaacucacgccaaguagaaguauccugggaauacccagauacauggucaacaccacacucauauuucagcuuaacauucuguguacaaguacaaggaaaaucaaaaagagaaaaaaaagauagaguauucaccgacaagacaagcgcaacaguaauuuguagaaaaaacgcaucaauaucaguaagagcacaagacagauacuacagcucaagcuggucagaaugggcaaguguaccauguuca

SEQ ID NO: 617 - RNA, 921 nt, Artificial Sequence
  IL12B(23-328)
auaugggaauuaaaaaaagacguauacguaguagaacuagauugguacccagaugcaccaggagaaaugguuguauuaacaugcgacacaccagaagaagauggaauaacauggacacuagaccaaaguagugaaguacuaggaagcggcaaaacauuaacuauacaaguaaaagaauucggagacgcaggacaauauacaugucacaaaggaggagaaguccuaucccacaguuuauuauuauuacacaaaaaagaagacggaauauggaguacagauauacuaaaagaccaaaaagaacccaaaaacaaaacauuucuaaggugcgaagcaaaaaacuauucaggaagauuuacauguugguggcuaacuacaauaucaacagaccucacauuuucaguaaaauccaguagaggaaguucagauccacaaggaguaacauguggagcagcaacacuaucagcagaaagaguaagaggagacaauaaagaauaugaauauucaguagaaugccaagaagauagcgcuugcccagcagcagaagaaagccuuccaauagaaguaaugguagacgcaguucacaaauuaaaauaugaaaauuacaccagcucauucuuuauaagagacauaauaaaaccagauccaccaaaaaauuuacaacuaaaaccauuaaaaaauucaagacaaguagaaguaagcugggaauacccagauacauggagcaccccacacucauacuucucauuaacauuuuguguacaaguacaaggaaaaagcaaaagagaaaaaaaagacaggguauucacagauaaaacaagcgcaacaguaauauguagaaaaaacgcaucaauaagcguaagagcacaagauagauauuacucaucaucauggucagaaugggcauccguaccaugcucauaa

SEQ ID NO: 618 - RNA, 54 nt, Artificial Sequence; identical to SEQ ID NO: 97
  Linker-sFvCC49-218

SEQ ID NO: 619 - RNA, 1632 nt, Artificial Sequence
  IL12
augugccaccaacaacuaguuauaucaugguuuucacuaguauuucuagccucaccacucguagccauaugggaacuaaaaaaggacguauacguuguagaacucgacugguacccagaugcaccaggcgaaaugguaguacuuacaugcgauacacccgaagaagacggaaucacauggacauuagaucaaucaucagaaguacuaggauccggcaaaacauuaacaauacaaguaaaagaauucggcgaugccggacaauauacaugccacaaaggaggagaaguauuaagucacucacuacuuuuacuucauaaaaaagaagacgguauuuggucaacagacauacuuaaagaucaaaaggaaccaaaaaacaaaacauuccuacgaugcgaagcaaagaauuauucgggccgauucacaugcugguggcuaacaacaauuuccacagaccuaacauucucaguuaaguccucaagaggaaguuccgauccacaaggaguaacauguggcgccgcaacauuaagcgcagaacgcguaagaggagauaacaaagaauacgaauacucaguagaaugccaagaggacuccgccuguccagcagccgaagaaucuuuaccaauagaaguaaugguagaugcaguacauaaacuaaaauacgaaaacuauacgucaucauucuuuauaagagauauaaucaaaccagacccaccuaaaaaucuacaacuaaaaccccuaaaaaauucacgacaaguagagguuucaugggaauauccagauacauggucaacaccacacagcuacuuuaguuuaacauucuguguacaaguccagggaaaaucaaaaagagaaaaaaaagacagaguauuuaccgacaaaacauccgcaacaguaauauguagaaaaaaugcauccauaucaguacgagcacaagaccgauacuauucaucaaguuggucagaaugggcaucaguaccuugcuccggaaguaccucaggcaguggaaaaccaggaucaggagaaggaucaaccaaaggaagaaaccuaccaguagcaacaccugacccaggcauguucccuugcuuacaucacucacaaaaccuacuacgagcugugucaaauauguuacaaaaagcaagacaaaccuuagaauuuuauccaugcacaucagaagaaaucgaccaugaagacauaaccaaagacaaaacaagcacaguugaagccuguuuaccauuagaacucacgaaaaacgaauccugucucaacucaagagaaacaucauuuauaacaaauggcucaugccuugccucacguaaaacaucauucaugauggcacuaugccuuucauccauauacgaagaccuaaaaauguaccaaguagaauucaaaacaaugaaugcaaaauuacuaauggacccaaaaagacaaauauuuuuagaccaaaacauguuagcaguaauagacgaauuaaugcaagccuuaaacuucaauucagaaacaguaccccaaaaaucaagcuuagaagaaccagacuuuuauaaaacuaaaauaaaacuaugcauccuauuacacgcuuuuagaauaagagcaguuacaauagacagagucaugagcuaucuaaaugcaucauga

SEQ ID NO: 620 - RNA, 786 nt, Artificial Sequence
  CD40LG
augauagaaacauacaaucaaaccuccccaagauccgcagcaacaggacuaccaauaucaaugaaaauauucauguacuuacuaacaguauuccucauaacacaaaugauaggauccgcacuuuucgcaguauaccuacacagaagauuagacaaaauagaagacgaacgaaaccuacacgaagacuucguauuuaugaaaacuauacaacgcugcaacacaggagaaagaucucuaucucuauuaaacugcgaagaaaucaaaucacaauuugaaggauuuguaaaagacauaaugcuaaacaaagaagaaaccaaaaaagaaaacucauucgaaaugcaaaaaggagaccaaaacccacaaauagcagcccacgucauauccgaagcaagcucaaaaacaaccucaguacuacaaugggcagaaaaaggauacuacacaaugucaaacaaccuaguaacccuagaaaacggaaaacaacuaacagucaaaagacaaggacuauacuacauauacgcacaaguaacauucugcucaaacagagaagcaucaucccaagcacccuucauagcaucacuaugccucaaaucaccaggaagauucgaacgaauacuauuaagagcugcaaacacacauucaucagcaaaaccauguggacaacaaucaauacaccuaggaggaguauucgaauuacaaccaggagcaucaguauucguaaauguuacugaccccucacaagucucacacggaacaggauucacaucauucggacuauuaaaacuauaa

SEQ ID NO: 621 - RNA, 867 nt, Artificial Sequence
  PDCD1
augcaaauaccacaagcaccauggccaguaguaugggcaguacuacagcuagguuggagaccaggaugguuucuagauucaccagauagaccauggaauccaccuacauuuucacccgcauuauuaguaguaacugaaggagacaaugcaacauuuacaugcucauuuucaaauacaucugaaagcuuuguauuaaauugguauagaaugagccccucaaaucaaacagauaaauuagcagcauucccagaagauagaucacaacccggacaagauuguagauuuagaguuacacaacuaccaaauggaagagauuuucauaugucaguaguaagagcaagaagaaaugauagcggaacauauuuauguggagcaauaagcuuagcaccaaaagcacaaauaaaagaaaguuuaagagcagaauuaagaguaacagaaagaagagcagaaguaccaaccgcacauccaucaccaaguccaagaccagcuggucaauuccaaacuuuaguaguaggaguaguaggaggacuauuaggaaguuuaguauuauuaguauggguacuagcaguaauauguucaagagcagcaagaggaacaauaggugcaagaagaacaggacaaccauuaaaagaagacccaucagcuguaccaguuuuuucaguagauuauggagaacuugauuuucaauggagagaaaaaacuccugaaccaccaguaccauguguuccagaacaaacugaauaugcuacaauagucuucccaucaggaaugggaacaaguaguccagccagaagaggaucagcagauggaccaagaucagcacaaccauuaagaccagaagacggacacuguagcuggccacuauaa

SEQ ID NO: 622 - RNA, 450 nt, Artificial Sequence
  PDCD1(1-149)
augcaaauaccacaagcaccauggccaguaguaugggcaguacuacaacuaggauggagaccaggaugguucuuagacucaccagacagaccauggaacccaccaacauucucaccagcacuacuaguaguaacagaaggagauaacgcaacauucacaugcucauucaguaacacaucagaaucauucguauuaaacugguacagaaugucaccaucaaaccaaacagacaaacuagcagcauucccagaagacagaucacaaccaggacaagacugcagauucagaguaacacaauuaccaaacggaagagacuuccacaugucaguaguaagagcaagaagaaaugacucaggaacauaccuaugcggagcaauaucacuagcaccaaaagcacaaauaaaagaaucacuaagagcagaauuaagaguaacagaaagaagagcauaa

SEQ ID NO: 623 - RNA, 660 nt, Artificial Sequence
  IL12A
augugcccagcaagaucacuacucuuaguagcaacacuagucuuacuagaccaccuaucacuagcaagaaaccuaccaguagcaacaccagacccaggaauguucccaugccuacaccauucacaaaauuuauuaagagcaguauccaacaugcuacaaaaagcaagacaaacauuagaauucuacccaugcacauccgaagaaauagaccacgaagacauaacaaaagacaaaacaucuacaguagaagcaugccuaccacuagaacuaacaaaaaacgaaucaugccuaaacucaagagaaacaucauucaucacaaacggcuccugcuuagcaucaagaaaaacaucauucaugauggcacuaugccuaucaucaauauacgaagaccuaaaaauguaccaaguagaauucaaaacaaugaacgcaaaacuacuaauggacccaaaaagacaaauauuccuagaccaaaacaugcuagcaguaauagaugaacuaaugcaagcacuaaacuucaacucagaaacaguaccccaaaaaucaucacuagaagaaccagacuucuacaaaacaaaaauaaaacucugcauacuacuacacgcauucagaauaagagccguaacaauagacagaguaaugucauaccuaaacgcaucauaa

SEQ ID NO: 624 - RNA, 657 nt, Artificial Sequence
  IL12A(1-219)
augugcccagccagaucacuauuacucguagcaacauuaguauuacuagaccaccuaucacuagcaagaaaccuacccguagcaacacccgacccaggaauguuccccugccuacaucacucccaaaaccuacuaagagcaguaucaaacauguuacaaaaagcacgacaaacacuagaauucuaccccugcacaucagaagaaauagaccacgaagacauaacaaaagacaaaacaucaacaguagaagcaugccucccacuagaacuaacaaaaaacgaaucaugccuaaacucaagagaaacaucauucauaacaaacggaucaugccuagcaucaagaaaaacaucauucaugauggcacuaugccuaucaucaauauacgaagaccuaaaaauguaccaaguagaauucaaaacaaugaacgcaaaacuauuaauggacccaaaaagacaaauauuccuagaccaaaacaugcucgcaguaauagacgaacuaaugcaagcacuaaacuucaacuccgaaacaguaccccaaaaaucaucacucgaagaaccagacuuuuacaaaacaaaaauaaaacuaugcauacuacuacacgcauucagaauaagagcaguaacaauagacagaguaaugucauaccuaaacgccuca

SEQ ID NO: 625 - RNA, 594 nt, Artificial Sequence
  IL12A(23-219)
agaaaccuaccaguagcaacaccagaccccggaauguucccaugccuccaccacucacaaaaccuacuaagagcaguaucaaacauguuacaaaaagccagacaaacauuagaauuuuacccauguacaucagaagaaauagaccacgaagacauaacaaaagacaaaacaucaacaguagaagcaugccuaccauuagaacuaaccaaaaacgaaucaugccuaaacucaagagaaacaucauucauaacaaacggaucaugccuagcaucaagaaaaacaucauucaugauggcacuaugccuaucauccauauacgaagaccuaaaaauguaccaaguagaauuuaaaacaaugaacgcaaaacuccuaauggacccaaaaagacaaauauuccuagaccaaaauaugcucgcaguaauagacgaauuaaugcaagcacuaaacuucaacucagaaacaguaccacaaaaaucaucccuagaagaacccgacuucuacaaaacaaaaauaaaacuaugcauacuacuacacgcauucagaauaagagccguaacaauagacagaguaaugucauaccuaaacgcaucauaa

SEQ ID NO: 626 - RNA, 987 nt, Artificial Sequence
  IL12B
augugccaccaacaacuaguaaucagcugguuuucauuaguauuucuagcaucaccacuaguagcaauaugggaacuaaaaaaagacguauacguaguagaacucgacugguacccagacgcaccaggagaaaugguaguacuaacaugcgacacaccagaagaagacggaauaacauggacacuagaucaaucaucagaaguacuaggaucagguaaaacacuaacaauccaaguaaaagaauucggagacgcuggacaauacacaugucacaaaggaggagaaguacuaagccacucacuauuauuacuacacaaaaaagaagacggcauauggucaacagacauacuaaaagaccaaaaagaaccaaaaaacaaaacauuucucagaugcgaagcaaaaaauuacucaggaagauucacaugcuggugguuaacaacaauaucaacagaucuaacauuuucaguaaaaucaucaagaggaucaucagacccacaaggaguaacaugcggagcagcaacacucagcgcagaaagaguaagaggagauaauaaagaauacgaauacucaguggaaugccaagaagauagugcaugcccagcagccgaagaaucauuaccaauugaagucauggucgacgcuguacauaaauuaaaauacgaaaauuacacaaguucauucuuuauaagagacauaauaaaaccagauccaccaaaaaaucuacaacuaaaaccauuaaaaaauaguagacaaguagaaguaagcugggaauauccagacacauggucaacaccacacaguuauuucucauuaacauucuguguacaaguacaaggaaaaaguaaaagagaaaaaaaagauagaguuuucacagacaaaacauccgcaacaguuauauguagaaaaaacgcaucaauaucaguaagagcccaagacagauacuacucaucaaguuggucagaaugggcaucgguaccaugcagcuaa

SEQ ID NO: 627 - RNA, 984 nt, Artificial Sequence
  IL12B(1-328)
augugccaccaacaacuaguuauuuccugguucucauuaguauuccuagccucaccauuaguagcuauaugggaauuaaaaaaagauguauacguaguagaacuagacugguacccagaugcaccaggagaaaugguaguacuaaccugcgacacaccagaagaagacggaauaacauggacccuagaccaaucaucagaaguauuaggaaguggaaaaacacuaacaauacaaguaaaagaauucggagacgcaggacaauauacuugccacaaaggaggagaaguauuaagucauucauuacuccuauuacacaaaaaagaagacggaauauggagcaccgacauacuaaaagaccaaaaagaaccaaaaaacaaaacauuccuaagaugcgaagcaaaaaacuacucaggaagauuuacaugcugguggcuaacaacaauaucaacagaccuaaccuucuccguuaaaaguucaagaggaaguucagauccacaaggaguaacauguggagcagcaacacuaagcgcagaaagaguaagaggcgacaauaaagaauaugaauacucaguagaaugccaagaagauucagcaugucccgcggccgaagaaucacuaccaauagaaguaaugguagacgcaguacacaaacucaaauaugaaaacuacacaucaucauucuuuauaagagacauaauaaaaccagacccaccaaaaaaucuacaacuaaaaccauuaaaaaacucaagacaaguugaaguaagcugggaauauccagacacauggucaacaccacacucauacuuuucacuaacauuuugcguacaaguacaagguaaaucaaaaagagaaaaaaaagaucgaguauuuacagacaaaacaagugcaacagucauauguagaaaaaacgcaucaauaucagucagagcacaagacagauauuacaguaguucauggucagaaugggcaagcguuccaugcuca

SEQ ID NO: 628 - RNA, 921 nt, Artificial Sequence
  IL12B(23-328)
auaugggaacucaaaaaagauguauacguagucgaacuagacugguacccagacgcaccaggagaaaugguaguacuaacaugugauacaccagaagaagauggaauaacauggacacuagaccaaucaucagaaguauuaggaucaggaaaaacacuaacaauacaaguaaaagaauuuggagaugcaggacaauauacaugccacaaaggaggagaaguacuaucgcacagcuuauuacuacuacacaaaaaagaagacggaauauggagcacagacauauuaaaagaccaaaaagaaccaaaaaacaaaacauucuuacgaugcgaagcaaaaaacuauucaggaagauucacaugcugguggcuaacaacaaucagcacagaccuaacauuuucaguaaaaucaagcagaggaucaucagauccacaaggagucacauguggagcagcaacacuuucagccgaaagaguuagaggagauaauaaagaauacgaauacucaguagaaugccaagaagacagcgcauguccagcagcagaagaaagccuaccaauagaaguaaugguagacgcaguucacaaauuaaaauacgaaaauuacacaucaucauucuucauaagagacauaauaaaaccagacccaccaaaaaaccuacaauuaaaaccacuaaaaaacagcagacaaguagaaguaucaugggaauauccagacacauggucaacaccucacagcuacuuuucacuaacauucugcguacaaguacaaggaaaaucaaaaagagaaaaaaaagacagaguauucacagacaaaacaagcgcaacaguaauaugcagaaaaaacgccagcauaucaguuagagcacaagacagauauuacagcucaagcuggucagaaugggcaucaguccccugcucauaa

SEQ ID NO: 629 - RNA, 54 nt, Artificial Sequence; identical to SEQ ID NO: 97
  Linker-sFvCC49-218

SEQ ID NO: 630 - RNA, 1632 nt, Artificial Sequence
  IL12
augugccaucaacaacuaguaauauccugguucuccuuaguguucuuagcaucuccacuaguagcaauaugggaauuaaaaaaagacguauacguaguagaauuagacugguauccugacgcaccaggugaaaugguuguauuaacaugcgauacuccagaagaagacggaauaacauggacacucgaccaaucaucagaaguacuagguucaggaaaaacacuaacuauucaaguaaaagaauucggagaugcaggccaauacacgugucauaaaggaggcgaaguacucagccauucacuauuauuacuucacaaaaaagaagacggaauauggaguacagacauauuaaaagaucaaaaagaaccaaaaaauaaaacauuuuugagaugcgaagcaaaaaauuauucaggaagauuuacauguugguggcuaaccaccauaucaacagaucuaacauucuccguaaaaucaucaagaggaucaucggacccucaaggaguaacaugcggagcagcaacacuaucagcagaaagaguaagaggagauaauaaagaauacgaauauucaguagaaugccaagaggacagcgcuugccccgccgcagaagaaagcuuaccuauagaaguuaugguagacgcaguacauaaguuaaaauaugagaauuacacaucauccuuuuucauaagagauauuauaaaaccugauccacccaagaaccuacaauuaaaaccacuaaaaaauagucgacagguugaaguuucaugggaauacccagacacauggagcacaccacacucauacuucucacuaacauucuguguacaaguacaaggaaaaucgaaacgcgaaaaaaaagacagaguauuuacagacaaaacaagugcaacagugauaugucgaaaaaacgcaucaauuucaguaagagcacaagacagauauuacucaucaagcuggucagaaugggcaucuguacccugcagcggaaguacaucaggaucagguaaaccuggaucuggagaaggaucaacuaaaggaagaaauuuacccguggcaacaccagacccaggaauguuccccugucuacaccacucgcaaaaucuacuaagagcagugucaaacaugcuacaaaaagcaagacaaacacuagaauuuuauccauguacuucagaagaaauagaccaugaagacauuaccaaagacaaaacaucaacagucgaagcauguuuaccauuagaauuaacaaaaaaugaaucauguuuaaauagucgugaaacuucauuuauaacaaacggcucaugccuagcaucaagaaaaacaaguuucaugauggcacuaugccucucaucaauauaugaagaucuaaaaauguaucagguagaauuuaaaacuaugaacgcgaaauuacuaauggauccaaaaagacaaaucuuccuagaccaaaacauguuagcaguaauagacgaacuaaugcaagcacuaaacuucaauagcgaaaccguaccacaaaaaucaucccuagaagaaccugacuucuacaaaacuaaaauaaaauuauguauauuacuccaugcauucagaauaagagcaguaacaauagacagaguaauguccuaccuaaaugcuucuuaa

SEQ ID NO: 631 - RNA, 786 nt, Artificial Sequence
  CD40LG
augauagaaacauacaaucaaacaagucccagauccgcagcaacaggucuaccaauaucaaugaaaauauuuauguauuuacuaacaguauuccuuauaacacaaaugauaggauccgcacuauucgcaguauaccuacacagaagauuagacaaaauagaagacgaaagaaaccuacacgaagacuucguauucaugaaaacaauacaaagaugcaauacaggagaaagaucauuaucacuacuaaacugcgaagaaauaaaaagccaauuugaaggguuugucaaagacauaaugcuaaacaaagaagaaaccaaaaaagaaaacucauucgaaaugcaaaaaggagaucaaaacccacaaauagcagcacacguaauaucagaagcaucaucaaaaacaacaucaguacuacaaugggccgaaaaaggauacuacacaaugucaaacaaccuaguaacacuagaaaacggaaaacaauuaacaguaaaaagacaaggacuauacuacaucuaugcccaaguaaccuucugcuccaacagagaagcaucaucacaagcaccauucaucgcaucacuaugccuaaaaucaccaggaagauucgaaagaauauuacuaagagcagcaaacacacacucaucagccaaaccaugcggacaacaaucaauacaccuaggaggagucuucgaacuacaaccaggagcaucaguauucguaaacguaacagauccaucacaaguaucacacggaacaggauucacaucauuuggacuacuaaaacucuaa

SEQ ID NO: 632 - RNA, 1632 nt, Artificial Sequence; identical to SEQ ID NO: 32
  IL12(IL12B-Linker-IL12A)

SEQ ID NO: 633 - RNA, 1632 nt, Artificial Sequence; identical to SEQ ID NO: 43
  IL12(IL12B-Linker-IL12A)

SEQ ID NO: 634 - RNA, 1632 nt, Artificial Sequence; identical to SEQ ID NO: 54
  IL12(IL12B-Linker-IL12A)

SEQ ID NO: 635 - RNA, 1632 nt, Artificial Sequence; identical to SEQ ID NO: 76
  IL12(IL12B-Linker-IL12A)

SEQ ID NO: 636 - RNA, 1632 nt, Artificial Sequence; identical to SEQ ID NO: 87
  IL12(IL12B-Linker-IL12A)

SEQ ID NO: 637 - RNA, 1632 nt, Artificial Sequence; identical to SEQ ID NO: 98
  IL12(IL12B-Linker-IL12A)

SEQ ID NO: 638 - RNA, 1632 nt, Artificial Sequence; identical to SEQ ID NO: 109
  IL12(IL12B-Linker-IL12A)

SEQ ID NO: 639 - RNA, 1632 nt, Artificial Sequence; identical to SEQ ID NO: 120
  IL12(IL12B-Linker-IL12A)

SEQ ID NO: 640 - RNA, 1632 nt, Artificial Sequence; identical to SEQ ID NO: 131
  IL12(IL12B-Linker-IL12A)

SEQ ID NO: 641 - RNA, 1632 nt, Artificial Sequence; identical to SEQ ID NO: 142
  IL12(IL12B-Linker-IL12A)

SEQ ID NO: 642 - RNA, 1632 nt, Artificial Sequence
  IL12(IL12B-Linker-IL12A)
augugccaccaacaacucgucaucagcugguucagccucgucuuccucgccuccccccuaguagccauaugggaacuaaaaaaagacguauacguuguagaacuagacugguaccccgacgcacccggcgaaauggucguccucaccugcgacacccccgaagaagauggcauaacauggacccucgaccaauccucagaaguccucggcuccggcaaaacccucacaauccaagucaaagaauucggcgacgccggccaauacaccugccacaaaggcggcgaaguccucucucacucucuccuccuccuccacaaaaaagaagacggcaucugguccaccgacauacucaaagaccaaaaagaacccaaaaacaaaaccuuccugcgaugcgaagccaaaaacuacuccggccgauucacaugcugguggcucaccaccaucucaaccgaccucaccuucuccgucaaauccucccguggcagcuccgacccccaaggagucaccugcggcgcagccacccucuccgccgaacgcgucagaggcgacaacaaagaauacgaauacuccgucgaaugccaagaggacuccgccugccccgccgccgaagaaucacuccccaucgaagucaugguagacgccguacacaaacuaaaauacgaaaacuacaccucuucauucuucauccgagacaucaucaaacccgacccccccaaaaaccuccaacucaaaccccucaaaaacucccgacaagucgaagucagcugggaauacccagacaccugguccaccccacacuccuacuucucacuaaccuucugcguccaaguccaaggcaaaucgaaacgcgaaaaaaaagacagagucuucaccgacaaaaccucagccaccgucaucugccgaaaaaacgcaucaaucagcguccgcgcccaagaccgcuacuacuccuccagcuggagcgaaugggcauccguccccugcuccgggaguacgagugggagugggaagccggggaguggggaggggaguacgaaggggcgcaaccuccccgucgccacccccgaccccggcauguuccccugccuccaccacucccaaaaucuccuccgcgccgucuccaacaugcuccaaaaagcccgccaaacccucgaauucuaccccugcacguccgaagaaaucgaccacgaagacaucaccaaagacaaaaccuccaccgucgaagccugccucccccucgaacucaccaaaaacgaauccugccucaacucacgcgaaaccuccuucaucaccaacggcucaugccucgccucacgaaaaaccuccuucaugauggcccucugccucuccucaaucuacgaagaccucaaaauguaccaagucgaauucaaaaccaugaacgccaaacuccucauggaccccaaacgccaaaucuuccucgaccaaaacaugcucgcagucaucgacgaacucaugcaagcccucaacuucaacuccgaaaccgucccccaaaaaucaucccucgaagaaccagacuucuacaaaaccaaaaucaaacucugcauccuccuccacgccuuccgcauccgcgccguaaccaucgaccgcgucaugucauaccucaacgccuccuaa

SEQ ID NO: 643 - RNA, 1632 nt, Artificial Sequence
  IL12(IL12B-Linker-IL12A)
augugccaucaacaacuaguaauaucaugguucucacuaguauucuuagcaaguccccuaguagcaauaugggaacuaaaaaaagacgucuacguuguagaauuagacugguacccagacgcaccaggcgaaaugguaguacuaacaugcgauacaccagaagaagacggaauaacauggacacuagaccaaucaucagaaguucuaggaucaggaaaaacauuaacaauacaaguaaaagaauucggggacgcaggacaauauacaugccacaaaggaggagaaguuuuaucacacucacuacuauuauuacacaaaaaagaagacggaauauggucaacugacauacuaaaagaucaaaaagaaccaaaaaacaaaacauucuuaagaugugaagcaaaaaauuacaguggaagauucacaugcugguggcuaacaacaauaaguacagaccuaacauuuucaguaaaaucaaguagaggaucaucagacccacaaggcguaacauguggagcagcaacacuaucagcagaacgagucagaggagacaacaaagaauacgaauacuccguagaaugccaagaagacagugcaugccccgcagccgaagaaucauuaccaauagaaguaaugguagacgcaguacacaaacuaaaauacgaaaacuacacaagcucauucuuuauacgagauauaauaaaaccagacccaccaaaaaaccuacaacuaaaaccacuaaaaaacucacgccaaguagaaguauccugggaauacccagauacauggucaacaccacacucauauuucagcuuaacauucuguguacaaguacaaggaaaaucaaaaagagaaaaaaaagauagaguauucaccgacaagacaagcgcaacaguaauuuguagaaaaaacgcaucaauaucaguaagagcacaagacagauacuacagcucaagcuggucagaaugggcaaguguaccauguucaggaaguacaaguggaaguggaaaaccaggaaguggagaaggaaguacaaaaggaagaaaccuaccaguagcaacacccgacccaggaauguucccaugccuacaccacucacaaaaccuacuacgcgcaguaucaaacauguuacaaaaagcacgacaaacacuugaauucuaccccugcacaucagaagaaauagaccacgaagacauaacaaaagacaaaacauccaccguagaagcaugccucccacuagaacuaacaaaaaacgaaucaugccuaaacucaagagaaacaucauucauaacaaacggaucaugccuagcaucacgaaaaacaucauucaugauggcacuaugccuauccuccauauacgaagaccuaaaaauguaccaaguagaauucaaaacaaugaacgcaaaacuacuaauggacccaaaaagacaaauauuccuagaccaaaacaugcucgcaguaauagacgaacuaaugcaagcacuaaacuuuaacucagaaacaguaccccaaaaaucaucacuagaagaaccagacuucuacaaaacaaaaauaaaauuaugcauacuccuacacgcauucagaaucagagcaguaacaauagaccgcguaaugucauaccuaaacgcaucauaa

SEQ ID NO: 644 - RNA, 1632 nt, Artificial Sequence
  IL12(IL12B-Linker-IL12A)
augugccaccaacaacuaguuauuuccugguucucauuaguauuccuagccucaccauuaguagcuauaugggaauuaaaaaaagauguauacguaguagaacuagacugguacccagaugcaccaggagaaaugguaguacuaaccugcgacacaccagaagaagacggaauaacauggacccuagaccaaucaucagaaguauuaggaaguggaaaaacacuaacaauacaaguaaaagaauucggagacgcaggacaauauacuugccacaaaggaggagaaguauuaagucauucauuacuccuauuacacaaaaaagaagacggaauauggagcaccgacauacuaaaagaccaaaaagaaccaaaaaacaaaacauuccuaagaugcgaagcaaaaaacuacucaggaagauuuacaugcugguggcuaacaacaauaucaacagaccuaaccuucuccguuaaaaguucaagaggaaguucagauccacaaggaguaacauguggagcagcaacacuaagcgcagaaagaguaagaggcgacaauaaagaauaugaauacucaguagaaugccaagaagauucagcaugucccgcggccgaagaaucacuaccaauagaaguaaugguagacgcaguacacaaacucaaauaugaaaacuacacaucaucauucuuuauaagagacauaauaaaaccagacccaccaaaaaaucuacaacuaaaaccauuaaaaaacucaagacaaguugaaguaagcugggaauauccagacacauggucaacaccacacucauacuuuucacuaacauuuugcguacaaguacaagguaaaucaaaaagagaaaaaaaagaucgaguauuuacagacaaaacaagugcaacagucauauguagaaaaaacgcaucaauaucagucagagcacaagacagauauuacaguaguucauggucagaaugggcaagcguuccaugcucaggaaguacaaguggaaguggaaaaccaggaaguggagaaggaaguacaaaaggaagaaaccuaccaguagcaacaccagaccccggaauguucccaugccuccaccacucacaaaaccuacuaagagcaguaucaaacauguuacaaaaagccagacaaacauuagaauuuuacccauguacaucagaagaaauagaccacgaagacauaacaaaagacaaaacaucaacaguagaagcaugccuaccauuagaacuaaccaaaaacgaaucaugccuaaacucaagagaaacaucauucauaacaaacggaucaugccuagcaucaagaaaaacaucauucaugauggcacuaugccuaucauccauauacgaagaccuaaaaauguaccaaguagaauuuaaaacaaugaacgcaaaacuccuaauggacccaaaaagacaaauauuccuagaccaaaauaugcucgcaguaauagacgaauuaaugcaagcacuaaacuucaacucagaaacaguaccacaaaaaucaucccuagaagaacccgacuucuacaaaacaaaaauaaaacuaugcauacuacuacacgcauucagaauaagagccguaacaauagacagaguaaugucauaccuaaacgcaucauaa

SEQ ID NO: 645 - protein, 467 aa, Artificial Sequence
  Ipilimumab protein HC with signale peptide
MELGLSWIFLLAILKGVQCQVQLVESGGGVVQPGRSLRLSCAASGFTFSSYTMHWVRQAPGKGLEWVTFISYDGNNKYYADSVKGRFTISRDNSKNTLYLQMNSLRAEDTAIYYCARTGWLGPFDYWGQGTLVTVSSASTKGPSVFPLAPSSKSTSGGTAALGCLVKDYFPEPVTVSWNSGALTSGVHTFPAVLQSSGLYSLSSVVTVPSSSLGTQTYICNVNHKPSNTKVDKRVEPKSCDKTHTCPPCPAPELLGGPSVFLFPPKPKDTLMISRTPEVTCVVVDVSHEDPEVKFNWYVDGVEVHNAKTKPREEQYNSTYRVVSVLTVLHQDWLNGKEYKCKVSNKALPAPIEKTISKAKGQPREPQVYTLPPSRDELTKNQVSLTCLVKGFYPSDIAVEWESNGQPENNYKTTPPVLDSDGSFFLYSKLTVDKSRWQQGNVFSCSVMHEALHNHYTQKSLSLSPGK

SEQ ID NO: 646 - RNA, 1404 nt, Artificial Sequence
  Ipilimumab HC with signale peptide
auggagcugggccucagcuggaucuuccugcuggccauccucaagggggugcagugccaggugcagcuggucgagagcggcgggggcguggugcagcccgggcgcucccuccggcugagcugcgccgccuccggcuucaccuucagcuccuacaccaugcacuggguccgccaggcgccggggaagggccuggagugggugacguucaucagcuacgacggcaacaacaaguacuacgccgacuccgugaaggggcgguucaccaucagccgcgacaacuccaagaacacccucuaccugcagaugaacagccugcgggccgaggacaccgccaucuacuacugcgcccgcacgggcuggcucgggcccuucgacuacuggggccaggggacccuggucaccguguccagcgcguccaccaagggccccagcguguucccccuggccccguccagcaaguccacgagcggcgggaccgccgcccucggcugccuggucaaggacuacuuccccgagcccgugaccguguccuggaacagcggggcgcugaccagcggcguccacacguuccccgccgugcuccaguccagcggccuguacucccugagcuccguggucaccgugccgagcuccagccucgggacccagaccuacaucugcaacgugaaccacaagcccuccaacacgaaggucgacaagcggguggagcccaagagcugcgacaagacccacacgugcccgcccugccccgcccccgagcugcugggcgggcccuccguguuccucuucccgcccaagcccaaggacacccugaugaucagccgcacccccgaggugaccugcgucguggucgacgugucccacgaggacccggaggucaaguucaacugguacguggacggcguggagguccacaacgccaagaccaagccccgggaggagcaguacaacagcaccuaccgcgugguguccguccugacggugcuccaccaggacuggcugaacgggaaggaguacaagugcaaggugagcaacaaggcccugcccgcgcccaucgagaagaccaucuccaaggccaagggccagccgcgggagccccaggucuacacccucccgcccagccgcgacgagcugaccaagaaccaggugucccugacgugccucgugaagggcuucuaccccagcgacaucgccgucgagugggagagcaacgggcagcccgagaacaacuacaagaccacgcccccggugcuggacuccgacggcagcuucuuccuguacuccaagcucaccguggacaagagccgguggcagcaggggaacgucuucuccugcagcgugaugcacgaggcccugcacaaccacuacacccagaagucccugagccucucccccggcaaguga

SEQ ID NO: 647 - RNA, 1404 nt, Artificial Sequence
  Ipilimumab HC with signale peptide
auggagcucggccucuccuggaucuuccuccucgccauccucaagggcguccagugccagguccagcucgucgaguccggcggcggcgucguccagcccggccgcucccuccgccucuccugcgccgccuccggcuucaccuucuccuccuacaccaugcacuggguccgccaggcccccggcaagggccucgagugggucaccuucaucuccuacgacggcaacaacaaguacuacgccgacuccgucaagggccgcuucaccaucucccgcgacaacuccaagaacacccucuaccuccagaugaacucccuccgcgccgaggacaccgccaucuacuacugcgcccgcaccggcuggcucggccccuucgacuacuggggccagggcacccucgucaccgucuccuccgccuccaccaagggccccuccgucuucccccucgcccccuccuccaaguccaccuccggcggcaccgccgcccucggcugccucgucaaggacuacuuccccgagcccgucaccgucuccuggaacuccggcgcccucaccuccggcguccacaccuuccccgccguccuccaguccuccggccucuacucccucuccuccgucgucaccguccccuccuccucccucggcacccagaccuacaucugcaacgucaaccacaagcccuccaacaccaaggucgacaagcgcgucgagcccaaguccugcgacaagacccacaccugcccccccugccccgcccccgagcuccucggcggccccuccgucuuccucuucccccccaagcccaaggacacccucaugaucucccgcacccccgaggucaccugcgucgucgucgacgucucccacgaggaccccgaggucaaguucaacugguacgucgacggcgucgagguccacaacgccaagaccaagccccgcgaggagcaguacaacuccaccuaccgcgucgucuccguccucaccguccuccaccaggacuggcucaacggcaaggaguacaagugcaaggucuccaacaaggcccuccccgcccccaucgagaagaccaucuccaaggccaagggccagccccgcgagccccaggucuacacccucccccccucccgcgacgagcucaccaagaaccaggucucccucaccugccucgucaagggcuucuaccccuccgacaucgccgucgagugggaguccaacggccagcccgagaacaacuacaagaccaccccccccguccucgacuccgacggcuccuucuuccucuacuccaagcucaccgucgacaagucccgcuggcagcagggcaacgucuucuccugcuccgucaugcacgaggcccuccacaaccacuacacccagaagucccucucccucucccccggcaaguga

SEQ ID NO: 648 - RNA, 1404 nt, Artificial Sequence
  Ipilimumab HC with signale peptide
auggagcugggccucagcuggaucuuccuucuggccauuuugaagggggugcagugccaaguccaguuaguugaauccggagguggcgugguacagcccgggagaucucugaggcuaucaugugcugcaaguggauuuaccuucagcuccuacacaaugcacugggugcggcaggccccuggcaaaggucucgagugggucacuuuuauaucuuaugacgggaacaauaaguacuaugcggauucggugaaaggacgcuucacgaucucacgagacaacagcaagaauacccuguaccuucaaaugaacagucugcgugcugaagauacagccauuuauuacugcgcaagaacuggcugguugggcccauuugacuauugggggcagggaacccucguuacaguguccucugccagcaccaaagguccguccgucuucccccuggcuccuucaaguaagagcacuucuggcgggacagcagcccugggaugucucgugaaggauuacuuuccagagcccguaaccguuuccuggaacucaggcgcuuuaacgagcggugugcauacuuucccugccguccugcagaguucugggcuuuacuccuugagcucgguggugaccgucccaucuuccucacugggaacacagacuuauaucugcaauguuaaucacaaacccaguaacaccaagguggacaaaaggguagaaccuaagagcugugauaaaacacauaccugcccaccgugucccgcgccugagcuacucggcggcccauccguguuucuguuucccccuaagccaaaggacacgcuuaugauuucucggacucccgaggucacaugcgugguuguggaugucagccacgaagacccggaggugaaauuuaauugguacguagaugggguugaagugcauaacgcaaagaccaaaccucgcgaggagcaauauaauucaacuuacagagucgugaguguccugacaguguugcaccaggacuggcucaacggaaaggaauauaaauguaagguuuccaauaaagcccugcccgcuccaaucgagaagaccauaagcaaggccaaaggucagccuagggaaccccagguguacacguuaccacccucucgggaugagcugaccaagaaccaaguaucacucacaugccuugucaaaggcuucuauccuagugacaucgcaguggaaugggagagcaaugggcagccagagaacaacuacaagacuaccccgcccguucuggacuccgauggaucuuucuucuuguacucgaaacuaacaguggacaagagccgcuggcagcaaggcaaugucuucuccuguucagugaugcacgaagcucugcauaaccacuauacucagaagagucucucucugagcccugguaaauga

SEQ ID NO: 649 - RNA, 1404 nt, Artificial Sequence
  Ipilimumab HC with signale peptide
auggagcugggccugagcuggaucuuccugcuggccauccugaagggcgugcagugccaggugcagcugguggagagcggcggcggcguggugcagcccggcagaagccugagacugagcugcgccgccagcggcuucaccuucagcagcuacaccaugcacugggugagacaggcccccggcaagggccuggagugggugaccuucaucagcuacgacggcaacaacaaguacuacgccgacagcgugaagggcagauucaccaucagcagagacaacagcaagaacacccuguaccugcagaugaacagccugagagccgaggacaccgccaucuacuacugcgccagaaccggcuggcugggccccuucgacuacuggggccagggcacccuggugaccgugagcagcgccagcaccaagggccccagcguguucccccuggcccccagcagcaagagcaccagcggcggcaccgccgcccugggcugccuggugaaggacuacuuccccgagcccgugaccgugagcuggaacagcggcgcccugaccagcggcgugcacaccuuccccgccgugcugcagagcagcggccuguacagccugagcagcguggugaccgugcccagcagcagccugggcacccagaccuacaucugcaacgugaaccacaagcccagcaacaccaagguggacaagagaguggagcccaagagcugcgacaagacccacaccugcccccccugccccgcccccgagcugcugggcggccccagcguguuccuguucccccccaagcccaaggacacccugaugaucagcagaacccccgaggugaccugcguggugguggacgugagccacgaggaccccgaggugaaguucaacugguacguggacggcguggaggugcacaacgccaagaccaagcccagagaggagcaguacaacagcaccuacagaguggugagcgugcugaccgugcugcaccaggacuggcugaacggcaaggaguacaagugcaaggugagcaacaaggcccugcccgcccccaucgagaagaccaucagcaaggccaagggccagcccagagagccccagguguacacccugccccccagcagagacgagcugaccaagaaccaggugagccugaccugccuggugaagggcuucuaccccagcgacaucgccguggagugggagagcaacggccagcccgagaacaacuacaagaccaccccccccgugcuggacagcgacggcagcuucuuccuguacagcaagcugaccguggacaagagcagauggcagcagggcaacguguucagcugcagcgugaugcacgaggcccugcacaaccacuacacccagaagagccugagccugagccccggcaaguga

SEQ ID NO: 650 - RNA, 1404 nt, Artificial Sequence
  Ipilimumab HC with signale peptide
auggagcugggccucagcuggaucuuccugcuugccauucugaagggggugcagugccaaguccagcucguugaauccggaggcgggguggugcagcccggaagaucucugcggcuuagcugugcugccuccggcuuuaccuucucuagcuacacaaugcacuggguccgccaggcgccugggaaaggacuggagugggugacguuuaucuccuaugacggcaacaauaaguacuaugcugauucuguuaaaggcagauucaccauuagccgggacaacuccaagaauacacucuaccugcaaaugaacagccugcgcgccgaagauaccgccaucuauuacugcgcuagaacaggguggcucggaccguuugacuauuggggccaggggacccuggugacagucucuuccgccagcaccaaaggacccucuguguucccucuugcucccuccagcaagucuacguccggcgggaccgccgcgcugggaugucucguuaaggauuacuuuccugagcccgugacagucagcuggaacuccggcgcccugaccucuggcgugcauacauucccugcugugcuucagagcuccgggcuguacagccucucuuccgucguuaccgugccgagcucuagccugggaacgcagacauauauuugcaaugugaaucacaaacccuccaacaccaaggucgacaaacggguggaaccuaagucuugugauaaaacacauaccugucccccuugccccgccccggagcugcucggcgggccuagcguuuuucuguuucccccuaagcccaaggacacccuuaugaucucccgcacacccgaggugacgugcgucgugguugaugugagccacgaagacccugaggucaaauucaauugguacguggauggagucgaagugcauaacgcuaagaccaaaccgagagaggagcaauauaauucuacauaccggguuguguccguccugaccgugcuccaccaggacuggcugaacggcaaggaauauaaauguaagguuagcaauaaagcccuucccgcgccuaucgagaagacaauuucuaaggccaaagggcagccccgcgaaccucagguguacacccugcccccguccagagaugagcucacgaagaaccaagucagccugacaugccuggugaaaggauucuauccuuccgacaucgcuguggaaugggagucuaauggccagcccgagaacaacuacaagaccaccccucccguucucgacagcgauggcuccuuuuuccuguacucuaaacuuacagucgacaagagccgguggcagcaagggaauguguucuccuguagcgugaugcacgaagcccugcauaaccacuauacccagaagucucucucccugagcccuggaaaauga

SEQ ID NO: 651 - RNA, 1404 nt, Artificial Sequence
  Ipilimumab HC with signale peptide
auggaauuagguuuauccuggaucuuucuccuagcaauacucaaaggaguacaaugccaaguacaauuaguggaauccggaggagguguaguacaaccaggaagaucacuaagacuaucaugcgcagcaucaggauuuacauucucaucauacacaaugcacuggguaagacaagccccaggaaaaggauuagaauggguuacauuuauauccuacgacggaaacaauaaauacuacgcagacucagucaaaggaagauucacuauaucaagagacaauucuaaaaacacacuauaccuacaaaugaacucucuccgagcagaagauacagccauauacuacugcgcaagaacaggaugguuaggaccuuucgacuacuggggacaaggaacucuaguaacugucucaucugccucaacaaaaggcccaucaguauuuccacuagccccaucaucuaaaucuacaucagguggaaccgcugcauuaggaugcuuaguaaaagacuauuuucccgaaccaguaacuguaucuuggaacuccggagcacuuacuucugguguacacacauucccagcaguuuuacaaagcucaggacuauacucucuaagcucaguaguaacugucccaucaucaucccuuggcacccaaacauacauauguaacguaaaucacaaacccaguaauaccaaaguagacaaaagaguagaacccaaaucaugugauaaaacacacacaugcccccccugcccagcaccugaacuucuaggaggaccaucuguauuccucuucccuccaaaaccaaaagauacucucaugauaucacgcacacccgaaguaacuugugucguaguagacguaucacacgaagacccagaaguuaaauucaacugguauguagacggaguagaaguccacaacgcaaaaacaaaaccacgagaagaacaauacaacuccaccuaucgcguaguuucaguacuuacaguucuccaccaagauuggcuaaacggaaaagaauacaaaugcaaaguaucaaauaaagcuuuaccugcaccaauagaaaaaacaauaaguaaagcaaaaggucaaccacgagaaccccaaguauauacacuuccaccaucaagagacgaacuuaccaaaaaccaagucucacucacaugcuuaguaaaaggauuuuacccaucagauauagcaguagaaugggaauccaauggacaaccagaaaauaauuacaaaaccacaccaccuguacuagauucagacggcucuuucuuucuauacucuaaacuaacaguugauaaaucacgauggcaacaaggcaauguauucucuuguucugucaugcaugaagcacuacacaaccacuacacacaaaaaucacuaucacuaucccccggcaaauga

SEQ ID NO: 652 - RNA, 1404 nt, Artificial Sequence
  Ipilimumab HC with signale peptide
auggagcugggccucagcuggaucuuccuguuggccauucugaagggggugcagugccaaguccagcucguggaauccgguggcgggguagugcagcccggcaggagucugcgguugagcugugcagccuccgguuuuaccuucaguagcuacacuaugcacuggguccgccaggcgccagggaaaggccuggagugggugaccuuuaucuccuaugacggcaacaauaaguacuaugccgauagcgugaaagggagguucacgauuucccgggacaacaguaagaauacucucuaccugcaaaugaacagccugcgcgcagaagauaccgccaucuauuacugcgcaaggaccgguuggcucggcccguuugacuauugggggcagggcacucuggucaccguguccagcgccaguacgaaaggucccuccguauucccauuggcgcccagcuccaagaguacuagcgggggcaccgccgcacugggcugucucgugaaggauuacuuuccagagcccgucacuguguccuggaauagcggggcccugaccaguggugugcauaccuucccagccguccugcaguccagcggcuuguacagucucuccagcgugguaacggugccgagcuccagucuggggacucagaccuauauuugcaacgucaaucacaaacccagcaacacuaagguggacaaacggguggaaccaaaguccugugauaaaacccauaccugucccccaugccccgcaccggagcugcucggcggucccagcgucuuucuguucccacccaagccaaaagacacuuugaugaucagucgcacgcccgaggugaccugcguaguggucgaugugucccacgaagacccagaggucaaguuuaauugguacguggauggcguggaaguacauaacgccaagacuaaaccgagggaggagcaauauaauagcaccuaccggguggucuccgugcugaccguccuccaccaggacuggcugaacgggaaggaauauaaauguaaggugaguaauaaagcgcugcccgccccaaucgagaagacuauuagcaaggcaaaaggccagccccgcgaaccacagguguacacguugcccccguccagggaugagcucaccaagaaccaaguaagccugacuugccuggugaaaggguucuauccaagugacaucgccgucgaaugggaguccaauggucagcccgagaacaacuacaagaccacucccccagugcucgacagcgauggcuccuucuuucuguacaguaaauugaccgucgacaagagccgguggcagcaagggaauguguucuccugcagcgugaugcacgaagcacugcauaaccacuauacgcagaagagucucucccugagccccggcaaauga

SEQ ID NO: 653 - RNA, 1404 nt, Artificial Sequence
  Ipilimumab HC with signale peptide
auggaacucggccuaagcuggaucuuccuccuggccauccucaaaggcguacagugccagguccaacucguagaauccggaggcggcgucguacaacccggccgcucccuccgccuauccugcgcagcuuccggcuucacauucaguucauacaccaugcacuggguccgacaagcccccggcaaaggacucgaaugggucacuuuuaucucuuacgacggcaacaauaaauacuacgcagacuccgucaaaggccgcuuuacaaucucacgugacaacuccaaaaacacccuauaccuccaaaugaacucccuacgcgcugaagacaccgccauuuacuauugcgcccgcacaggcuggcuuggaccauucgacuacuggggacaaggaacccuugucaccgucuccucugccagcaccaaaggccccuccgucuucccccucgcucccagcuccaaauccacgucaggcggcacugcagcccucggaugccuagucaaagacuacuuccccgaacccgucacagucucauggaacuccggagcccucacuucaggcguccacaccuuccccgcaguacuacaaucuucaggccuauacucccuaagcuccgucgucaccguacccuccucaucccucggaacacaaaccuacauaugcaacgucaaccacaaacccucaaacacaaaaguagacaaacgcgucgaacccaaauccugcgacaaaacccauaccugcccacccugccccgccccggaacuccuaggcggccccagcgucuucuuauucccacccaaacccaaagacacgcucaugauaaguagaacccccgaagugaccugcgucgucgucgacgucucccacgaagacccugaaguuaaauucaacugguacgucgacggcgucgaaguucacaacgccaaaaccaaaccccgagaagaacaauacaacuccaccuaccgagucgucucaguacuaacaguccuccaccaagacuggcucaacggaaaagaauacaaaugcaaagucuccaacaaagcacuaccugccccaaucgagaaaacaaucuccaaagccaaaggacaaccccgugaaccccagguauacacccuacccccaucacgcgacgaacucaccaaaaaucaggucagccuaaccugccucgucaaaggauucuaccccuccgacaucgccgucgaaugggaaagcaacggccaacccgaaaacaacuacaaaaccaccccacccguacucgacuccgacggcuccuucuuccucuacuccaagcucaccgucgacaaaucccgcuggcaacagggaaacguauucuccugcuccgucaugcacgaagcccuccacaaccacuauacccaaaaaucacucucccuaucacccggaaaauaa

SEQ ID NO: 654 - RNA, 1404 nt, Artificial Sequence
  Ipilimumab HC with signale peptide
auggaacuaggccuaucauggaucuuccuccucgccauccucaaaggcguccaaugccagguccaacucgucgaauccggcggaggcgucguccaacccggccgaucacuccgccucuccugcgccgccuccggcuucacuuucuccuccuacacaaugcacuggguacgccaagccccaggaaaaggacucgaaugggucaccuucaucuccuacgacggaaacaacaaauacuacgccgacagcguuaaaggacgauucacaaucucccgcgacaacucuaaaaacacccuauaccuccaaaugaacucccuccgcgccgaagacacagcaaucuacuacugcgccagaaccggauggcuaggccccuucgacuacuggggccaaggaacccucgucacaguauccuccgccuccaccaaaggcccuuccguauuuccccuggcccccucauccaaauccaccagcggcggaaccgccgcacuuggcugccucguaaaagacuacuuccccgaacccguaaccgucuccuggaacagcggcgcccuaacgucaggcguacacaccuuccccgcaguccuccaauccuccggacuauauagccucuccagcguaguaacaguacccuccagcucucucggcacacaaaccuauaucugcaacguaaaccacaaacccagcaacaccaaaguugacaaacgcguugaacccaaauccugcgacaaaacccacacaugcccacccugccccgcccccgaacuccucggcggucccucagucuuccucuucccaccaaaaccuaaagacacucuaaugauaucccgcaccccagaagugaccugcgucguagucgacgucucccacgaagaccccgaagucaaauucaacugguacgucgacggcgucgaaguacacaacgccaaaaccaaaccccgagaagaacaauacaacucaaccuacagagucgucagcguccucaccguccuccaucaggacuggcucaacggaaaagaauacaaaugcaaagucuccaacaaagcccuaccagcacccauagagaaaaccaucuccaaagccaagggccaaccacgcgaaccccaaguauacacacucccacccucacgagacgaacucaccaagaaccaaguaucuuuaaccugccuugucaaaggcuucuaccccuccgacaucgccguggaaugggaauccaacggacaacccgaaaacaacuacaagaccacaccacccguccuugacucagacggcuccuucuuccucuauuccaaacuuaccgucgacaaaucccgauggcaacaaggcaacgucuucuccugcucaguaaugcacgaagcccuacacaaccacuacacgcaaaaaucacucucccugucccccggaaaauga

SEQ ID NO: 655 - RNA, 1404 nt, Artificial Sequence
  Ipilimumab HC with signale peptide
auggaacuuggccuuuccuggaucuuccuccucgccauacucaaaggcguccaaugccaaguucagcuagucgaauccgguggcggcguaguccaacccggacgcagccuccgacuauccugcgccgccuccggauucaccuucuccucauacaccaugcacuggguccgccaagcccccggcaaaggccucgaaugggucacauucaucuccuacgauggaaacaacaaauacuacgccgacucagucaaaggccgcuucacaaucucccgagacaacuccaaaaacacccuauaccuccaaaugaacucacuuagagccgaagacacagcaauauacuacugcgcccgcaccggauggcuaggacccuucgacuacuggggccaagggacccucgucaccguuagcuccgccuccacaaaaggacccuccguauucccccucgccccauccuccaaauccacaucuggcggcaccgccgcacucggaugccucguaaaagacuacuuccccgaacccgucacagucagcuggaacucaggcgcucucaccuccggcguccacacauucccggcaguccugcaaagcagcggccucuacucccuaucaucuguagucaccgucccauccucuucccucggcacccaaaccuacaucugcaacguaaaccacaaacccagcaacaccaaaguggauaaacgaguagaacccaaaucuugcgacaaaacccacacuugcccacccugccccgccccagaacuucuaggcggacccuccgucuuccucuucccacccaaacccaaagacacccucaugaucucacgcacccccgagguaaccugcguugucgucgacgugucccacgaagacccugaagucaaguucaacugguacgucgacggcgucgaagugcacaacgccaaaacaaaaccacgcgaagaacaauauaacucaaccuaccgcguagucuccguccuaaccguccuccaccaagacuggcuaaacggcaaagaauacaaauguaaaguauccaauaaagcacuccccgcccccauagagaaaacgaucuccaaggccaaaggucaaccacgcgaaccccaaguauacacccuaccaccaucccgcgacgaacucaccaaaaaccaaguaucccuaaccugccuagucaaaggcuucuaccccuccgacaucgcaguagaaugggaauccaacggccaaccagaaaacaacuacaagacaacaccucccguccucgacuccgacggauccuucuucuuauacucaaaacuaaccgucgacaaaucuagauggcaacaaggcaacgucuucucaugcuccguaaugcacgaagcucuccacaaccacuacacccaaaaaucacucucccucucccccggcaaauga

SEQ ID NO: 656 - RNA, 1404 nt, Artificial Sequence
  Ipilimumab HC with signale peptide
auggaacuaggacucucauggauauuuuuacuagccauacucaaaggcguccaaugucaaguacaacuaguagaaucaggcggaggaguuguccaacccggccgaucccuccgcuuaucaugugcagcaucuggauucacauuuucaucauacacaaugcacugggucagacaagccccaggaaaagguuuagaauggguaacauuuauaucauacgacgguaacaacaaauacuaugcagacucaguaaaaggaagauuuacaaucagcagagacaauagcaaaaacacacuauaccuacaaaugaacucccuacgagcagaagacacagccaucuauuacugugcacgaacaggauggcuaggaccauucgauuacuggggccaaggaacauuagucaccguaucuucugcauccacaaaagguccuucaguauuuccauuagcacccagcuccaaaucuacaucuggcggaacagccgccuuaggaugcuuaguuaaagauuacuuuccagaaccaguaacaguuucauggaacucaggagcucuaacaucuggaguacacacauuuccagcaguccuacaaucauccggacuauauucacuaucaucaguaguaacuguccccucaucaucauuaggcacacaaacuuauauuugcaauguaaaccauaaaccaucaaauacaaaagucgacaaaagaguagaaccaaaaucaugcgacaaaacccacacauguccacccugccccgccccagaauuauuaggaggaccaucugucuuccuuuucccaccaaaaccaaaagacaccuuaaugauaucucgaacuccagaaguaacauguguaguuguagauguuucacaugaagacccagaaguaaaauucaacugguacgucgacggaguagaaguacacaaugcaaaaacaaaaccccgagaagaacaauacaacuccacauacagaguagucucaguacuaacaguacuccaucaagacuggcuaaacggaaaagaauacaaauguaaaguaaguaauaaagcacuacccgcaccaauagaaaaaacaauaucaaaagcaaaaggacaaccaagagaaccacaaguauauacacuaccuccauccagagaugaauuaacaaaaaaccaaguaagucuaacauguuuaguaaaaggauucuaucccagcgacauagcagucgaaugggaaucaaauggacaaccagaaaacaacuauaaaaccacaccaccaguauuagauucagacggaucauuuuuccuuuacucaaaauuaacaguagacaaauccagauggcaacaaggcaaugucuuuucaugcucugucaugcacgaagcucuacauaaucacuacacucaaaaaucacuaucacucucaccaggcaaauga

SEQ ID NO: 657 - RNA, 1404 nt, Artificial Sequence
  Ipilimumab HC with signale peptide
auggaacuaggacuauccuggauauuucuacuagccauccuaaaaggaguacaaugucaaguacaauuaguagaauccggaggcggaguaguccaacccggaagaucacuaagacucaguugugcagcaucaggauucacauuuucaucauauacaaugcacuggguuagacaagcacccggaaaaggacucgaauggguaaccuuuaucuccuacgauggaaacaauaaauauuacgcagauucuguaaaaggccgauucacaauaucaagagacaacucuaaaaauacauuauaccuacaaaugaacucuuuaagagcagaagacacagcaauauauuacugugcaagaacaggauggcucggaccauucgacuauuggggacaaggaaccuuaguaacaguauccagcgcuagcacaaaaggcccuucugucuucccauuagcaccauccucaaaaucaacuucuggcggaacagcagcucuaggaugcuuaguaaaagauuauuuuccagaaccaguuacuguauccuggaacucaggagcacuaaccaguggaguucacacauuuccagccguauuacaaucauccggauuauauucauuaucauccgucguaaccguaccaagcucaucauuaggaacacaaacauacauaugcaacguaaaucacaaaccauccaauacaaaaguagauaaaagaguagaaccuaaauccugugauaaaacacacacaugcccaccaugcccagcaccagaauuacuaggaggaccaucaguauuccuauucccaccaaaaccaaaagauacacuaaugauaucaagaacaccagaaguaacuuguguagucguagacgucucacaugaagacccagaaguaaaauuuaauugguauguugacggagucgaaguacacaacgccaaaacaaaaccacgagaagaacaauacaacucaacauauagaguaguaucuguauuaacaguauuacaucaagauugguuaaacggaaaagaauacaaauguaaaguaucaaauaaagcucuaccagcaccaauagaaaagacaaucucaaaagcaaaaggccaaccucgagaaccacaaguauacacacuaccaccaucaagagacgaauuaaccaaaaaccaagucucauuaacaugcuuaguuaaagguuucuaccccagcgacaucgcaguugaaugggaaucaaacggucaaccugaaaacaacuauaaaacaacaccaccaguuuuagacucagauggauccuuuuucuuauacucaaaauuaacaguugacaaaucaagauggcaacaaggaaaugucuuuucauguuccgucaugcaugaagcacuacacaaccauuacacccaaaaaucacucucacuaucacccgguaaauaa

SEQ ID NO: 658 - RNA, 1404 nt, Artificial Sequence
  Ipilimumab backbone Rituximab HC with signale peptide
auggagcugggccucagcuggaucuuccugcuggccauccucaagggggugcagugccaggugcagcuggucgagagcggcgggggcguggugcagcccgggcgcucccuccggcugagcugcgccgccuccggcuucaccuucagcuccuacaccaugcacuggguccgccaggcgccggggaagggccuggagugggugacguucaucagcuacgacggcaacaacaaguacuacgccgacuccgugaaggggcgguucaccaucagccgcgacaacuccaagaacacccucuaccugcagaugaacagccugcgggccgaggacaccgccaucuacuacugcgcccgcacgggcuggcucgggcccuucgacuacuggggccaggggacccuggucaccguguccagcgcguccaccaagggccccagcguguucccccuggccccguccagcaaguccacgagcggcgggaccgccgcccucggcugccuggucaaggacuacuuccccgagcccgugaccguguccuggaacagcggggcgcugaccagcggcguccacacguuccccgccgugcuccaguccagcggccuguacucccugagcuccguggucaccgugccgagcuccagccucgggacccagaccuacaucugcaacgugaaccacaagcccuccaacacgaaggucgacaagcggguggagcccaagagcugcgacaagacccacacgugcccgcccugccccgcccccgagcugcugggcggcccgagcguguuccucuucccgcccaagcccaaggacacccugaugaucagccgcacccccgaggucacgugcgugguggucgacgugagccacgaggaccccgaggugaaguucaacugguacgucgacgggguggaggugcacaacgccaagaccaagccccgggaggagcaguacaacagcaccuaccgcgucgugagcgugcugaccguccuccaccaggacuggcugaacggcaaggaguacaagugcaaggugucgaacaaggcccugccggcccccaucgagaagacgaucagcaaggcgaagggccagccgcgggagccccaggucuacacccucccgcccagccgcgacgagcugaccaagaaccaggugucccugacgugccucgugaagggcuucuaccccagcgacaucgccgucgagugggagagcaacgggcagcccgagaacaacuacaagaccacgcccccggugcuggacuccgacggcagcuucuuccuguacuccaagcucaccguggacaagagccgguggcagcaggggaacgucuucuccugcagcgugaugcacgaggcccugcacaaccacuacacccagaagucccugagccucucccccggcaaguga

SEQ ID NO: 659 - RNA, 1404 nt, Artificial Sequence
  Ipilimumab backbone Rituximab HC with signale peptide
auggagcugggccucagcuggaucuuccuucuggccauuuugaagggggugcagugccaaguccaguuaguugaauccggagguggcgugguacagcccgggagaucucugaggcuaucaugugcugcaaguggauuuaccuucagcuccuacacaaugcacugggugcggcaggccccuggcaaaggucucgagugggucacuuuuauaucuuaugacgggaacaauaaguacuaugcggauucggugaaaggacgcuucacgaucucacgagacaacagcaagaauacccuguaccuucaaaugaacagucugcgugcugaagauacagccauuuauuacugcgcaagaacuggcugguugggcccauuugacuauugggggcagggaacccucguuacaguguccucugccagcaccaaagguccguccgucuucccccuggcuccuucaaguaagagcacuucuggcgggacagcagcccugggaugucucgugaaggauuacuuuccagagcccguaaccguuuccuggaacucaggcgcuuuaacgagcggugugcauacuuucccugccguccugcagaguucugggcuuuacuccuugagcucgguggugaccgucccaucuuccucacugggaacacagacuuauaucugcaauguuaaucacaaacccaguaacaccaagguggacaaaaggguagaaccuaagagcugugauaaaacacauaccugcccaccgugucccgcccccgagcugcugggcggcccgagcguguuccucuucccgcccaagcccaaggacacccugaugaucagccgcacccccgaggucacgugcgugguggucgacgugagccacgaggaccccgaggugaaguucaacugguacgucgacgggguggaggugcacaacgccaagaccaagccccgggaggagcaguacaacagcaccuaccgcgucgugagcgugcugaccguccuccaccaggacuggcugaacggcaaggaguacaagugcaaggugucgaacaaggcccugccggcccccaucgagaagacgaucagcaaggcgaagggucagccuagggaaccccagguguacacguuaccacccucucgggaugagcugaccaagaaccaaguaucacucacaugccuugucaaaggcuucuauccuagugacaucgcaguggaaugggagagcaaugggcagccagagaacaacuacaagacuaccccgcccguucuggacuccgauggaucuuucuucuuguacucgaaacuaacaguggacaagagccgcuggcagcaaggcaaugucuucuccuguucagugaugcacgaagcucugcauaaccacuauacucagaagagucucucucugagcccugguaaauga

SEQ ID NO: 660 - RNA, 1404 nt, Artificial Sequence
  Ipilimumab backbone Rituximab HC with signale peptide
auggagcugggccugagcuggaucuuccugcuggccauccugaagggcgugcagugccaggugcagcugguggagagcggcggcggcguggugcagcccggcagaagccugagacugagcugcgccgccagcggcuucaccuucagcagcuacaccaugcacugggugagacaggcccccggcaagggccuggagugggugaccuucaucagcuacgacggcaacaacaaguacuacgccgacagcgugaagggcagauucaccaucagcagagacaacagcaagaacacccuguaccugcagaugaacagccugagagccgaggacaccgccaucuacuacugcgccagaaccggcuggcugggccccuucgacuacuggggccagggcacccuggugaccgugagcagcgccagcaccaagggccccagcguguucccccuggcccccagcagcaagagcaccagcggcggcaccgccgcccugggcugccuggugaaggacuacuuccccgagcccgugaccgugagcuggaacagcggcgcccugaccagcggcgugcacaccuuccccgccgugcugcagagcagcggccuguacagccugagcagcguggugaccgugcccagcagcagccugggcacccagaccuacaucugcaacgugaaccacaagcccagcaacaccaagguggacaagagaguggagcccaagagcugcgacaagacccacaccugcccccccugccccgcccccgagcugcugggcggcccgagcguguuccucuucccgcccaagcccaaggacacccugaugaucagccgcacccccgaggucacgugcgugguggucgacgugagccacgaggaccccgaggugaaguucaacugguacgucgacgggguggaggugcacaacgccaagaccaagccccgggaggagcaguacaacagcaccuaccgcgucgugagcgugcugaccguccuccaccaggacuggcugaacggcaaggaguacaagugcaaggugucgaacaaggcccugccggcccccaucgagaagacgaucagcaaggcgaagggccagcccagagagccccagguguacacccugccccccagcagagacgagcugaccaagaaccaggugagccugaccugccuggugaagggcuucuaccccagcgacaucgccguggagugggagagcaacggccagcccgagaacaacuacaagaccaccccccccgugcuggacagcgacggcagcuucuuccuguacagcaagcugaccguggacaagagcagauggcagcagggcaacguguucagcugcagcgugaugcacgaggcccugcacaaccacuacacccagaagagccugagccugagccccggcaaguga

SEQ ID NO: 661 - protein, 448 aa, Artificial Sequence
  Ipilimumab protein HC without signale peptide
QVQLVESGGGVVQPGRSLRLSCAASGFTFSSYTMHWVRQAPGKGLEWVTFISYDGNNKYYADSVKGRFTISRDNSKNTLYLQMNSLRAEDTAIYYCARTGWLGPFDYWGQGTLVTVSSASTKGPSVFPLAPSSKSTSGGTAALGCLVKDYFPEPVTVSWNSGALTSGVHTFPAVLQSSGLYSLSSVVTVPSSSLGTQTYICNVNHKPSNTKVDKRVEPKSCDKTHTCPPCPAPELLGGPSVFLFPPKPKDTLMISRTPEVTCVVVDVSHEDPEVKFNWYVDGVEVHNAKTKPREEQYNSTYRVVSVLTVLHQDWLNGKEYKCKVSNKALPAPIEKTISKAKGQPREPQVYTLPPSRDELTKNQVSLTCLVKGFYPSDIAVEWESNGQPENNYKTTPPVLDSDGSFFLYSKLTVDKSRWQQGNVFSCSVMHEALHNHYTQKSLSLSPGK

SEQ ID NO: 662 - RNA, 1347 nt, Artificial Sequence
  Ipilimumab HC without signale peptide
caggugcagcuggucgagagcggcgggggcguggugcagcccgggcgcucccuccggcugagcugcgccgccuccggcuucaccuucagcuccuacaccaugcacuggguccgccaggcgccggggaagggccuggagugggugacguucaucagcuacgacggcaacaacaaguacuacgccgacuccgugaaggggcgguucaccaucagccgcgacaacuccaagaacacccucuaccugcagaugaacagccugcgggccgaggacaccgccaucuacuacugcgcccgcacgggcuggcucgggcccuucgacuacuggggccaggggacccuggucaccguguccagcgcguccaccaagggccccagcguguucccccuggccccguccagcaaguccacgagcggcgggaccgccgcccucggcugccuggucaaggacuacuuccccgagcccgugaccguguccuggaacagcggggcgcugaccagcggcguccacacguuccccgccgugcuccaguccagcggccuguacucccugagcuccguggucaccgugccgagcuccagccucgggacccagaccuacaucugcaacgugaaccacaagcccuccaacacgaaggucgacaagcggguggagcccaagagcugcgacaagacccacacgugcccgcccugccccgcccccgagcugcugggcgggcccuccguguuccucuucccgcccaagcccaaggacacccugaugaucagccgcacccccgaggugaccugcgucguggucgacgugucccacgaggacccggaggucaaguucaacugguacguggacggcguggagguccacaacgccaagaccaagccccgggaggagcaguacaacagcaccuaccgcgugguguccguccugacggugcuccaccaggacuggcugaacgggaaggaguacaagugcaaggugagcaacaaggcccugcccgcgcccaucgagaagaccaucuccaaggccaagggccagccgcgggagccccaggucuacacccucccgcccagccgcgacgagcugaccaagaaccaggugucccugacgugccucgugaagggcuucuaccccagcgacaucgccgucgagugggagagcaacgggcagcccgagaacaacuacaagaccacgcccccggugcuggacuccgacggcagcuucuuccuguacuccaagcucaccguggacaagagccgguggcagcaggggaacgucuucuccugcagcgugaugcacgaggcccugcacaaccacuacacccagaagucccugagccucucccccggcaaguga

SEQ ID NO: 663 - RNA, 1347 nt, Artificial Sequence
  Ipilimumab HC without signale peptide
cagguccagcucgucgaguccggcggcggcgucguccagcccggccgcucccuccgccucuccugcgccgccuccggcuucaccuucuccuccuacaccaugcacuggguccgccaggcccccggcaagggccucgagugggucaccuucaucuccuacgacggcaacaacaaguacuacgccgacuccgucaagggccgcuucaccaucucccgcgacaacuccaagaacacccucuaccuccagaugaacucccuccgcgccgaggacaccgccaucuacuacugcgcccgcaccggcuggcucggccccuucgacuacuggggccagggcacccucgucaccgucuccuccgccuccaccaagggccccuccgucuucccccucgcccccuccuccaaguccaccuccggcggcaccgccgcccucggcugccucgucaaggacuacuuccccgagcccgucaccgucuccuggaacuccggcgcccucaccuccggcguccacaccuuccccgccguccuccaguccuccggccucuacucccucuccuccgucgucaccguccccuccuccucccucggcacccagaccuacaucugcaacgucaaccacaagcccuccaacaccaaggucgacaagcgcgucgagcccaaguccugcgacaagacccacaccugcccccccugccccgcccccgagcuccucggcggccccuccgucuuccucuucccccccaagcccaaggacacccucaugaucucccgcacccccgaggucaccugcgucgucgucgacgucucccacgaggaccccgaggucaaguucaacugguacgucgacggcgucgagguccacaacgccaagaccaagccccgcgaggagcaguacaacuccaccuaccgcgucgucuccguccucaccguccuccaccaggacuggcucaacggcaaggaguacaagugcaaggucuccaacaaggcccuccccgcccccaucgagaagaccaucuccaaggccaagggccagccccgcgagccccaggucuacacccucccccccucccgcgacgagcucaccaagaaccaggucucccucaccugccucgucaagggcuucuaccccuccgacaucgccgucgagugggaguccaacggccagcccgagaacaacuacaagaccaccccccccguccucgacuccgacggcuccuucuuccucuacuccaagcucaccgucgacaagucccgcuggcagcagggcaacgucuucuccugcuccgucaugcacgaggcccuccacaaccacuacacccagaagucccucucccucucccccggcaaguga

SEQ ID NO: 664 - RNA, 1347 nt, Artificial Sequence
  Ipilimumab HC without signale peptide
caggugcaacuggucgagagcggcgggggaguugugcagcccgguagaucccucaggcuuucuugcgccgcuucaggcuucaccuuuaguagcuacacaaugcacuggguacggcaggcaccugggaagggacuggaaugggugacuuucaucuccuaugacggcaacaauaaauacuaugccgauucugucaagggucgcuuuacgauuucgcgagacaacagcaaaaauaccuuguacuuacagaugaacucacugcgugcggaggauacagcuauauauuacugugccagaacuggguggcuaggaccauucgacuauuggggccaaggcacccucgugacaguuaguuccgcaucuaccaaggggccgagcguguuuccccuggccccuuccucaaaaaguacuagcggagguacagcugcacuuggcugccuggucaaggauuacuucccagaacccgugaccguaucuuggaacuccggggccuugacgucaggaguucauacuuuuccugcugugcuccagagcaguggccuguacucucuguccagcgucgugaccgugccaucgucuucccucgguacacagacuuauaucuguaaugucaaucacaagcccucaaacaccaaaguugacaagaggguggagccuaaaaguugcgauaagacacauaccuguccaccgugccccgccccugaauuacuugggggaccaagcguauuccuguuucccccuaaaccaaaggacacguugaugauuucccggacucccgaggugacaugugucgugguugaugugucucacgaggacccggaagucaaguucaauugguacguggauggcguagagguucauaacgcgaaaaccaagccucgcgaagaacaguauaauagcacuuacagaguggucucagugcugacaguccuacaccaagacuggcucaacggcaaagaguauaagugcaaagugaguaauaaggcacugcccgccccaaucgagaaaaccauuuccaaggcuaaggggcagccuagggagccccagguuuacacgcuuccacccagccgggaugaacugaccaaaaaccaggugucuuugacaugucucguaaagggauuuuauccuucagacaucgccgucgagugggaaaguaauggucaaccagagaacaacuacaaaacuaccccgcccgugcuggacagcgauggcuccuucuuuuuauacucuaagcugacaguugacaaaucgcgcuggcagcaggggaauguguucagcugcuccgucaugcacgaggcacuccauaaccacuauacucaaaagucacuuagucugucuccuggaaaguga

SEQ ID NO: 665 - RNA, 1347 nt, Artificial Sequence
  Ipilimumab HC without signale peptide
caggugcagcugguggagagcggcggcggcguggugcagcccggcagaagccugagacugagcugcgccgccagcggcuucaccuucagcagcuacaccaugcacugggugagacaggcccccggcaagggccuggagugggugaccuucaucagcuacgacggcaacaacaaguacuacgccgacagcgugaagggcagauucaccaucagcagagacaacagcaagaacacccuguaccugcagaugaacagccugagagccgaggacaccgccaucuacuacugcgccagaaccggcuggcugggccccuucgacuacuggggccagggcacccuggugaccgugagcagcgccagcaccaagggccccagcguguucccccuggcccccagcagcaagagcaccagcggcggcaccgccgcccugggcugccuggugaaggacuacuuccccgagcccgugaccgugagcuggaacagcggcgcccugaccagcggcgugcacaccuuccccgccgugcugcagagcagcggccuguacagccugagcagcguggugaccgugcccagcagcagccugggcacccagaccuacaucugcaacgugaaccacaagcccagcaacaccaagguggacaagagaguggagcccaagagcugcgacaagacccacaccugcccccccugccccgcccccgagcugcugggcggccccagcguguuccuguucccccccaagcccaaggacacccugaugaucagcagaacccccgaggugaccugcguggugguggacgugagccacgaggaccccgaggugaaguucaacugguacguggacggcguggaggugcacaacgccaagaccaagcccagagaggagcaguacaacagcaccuacagaguggugagcgugcugaccgugcugcaccaggacuggcugaacggcaaggaguacaagugcaaggugagcaacaaggcccugcccgcccccaucgagaagaccaucagcaaggccaagggccagcccagagagccccagguguacacccugccccccagcagagacgagcugaccaagaaccaggugagccugaccugccuggugaagggcuucuaccccagcgacaucgccguggagugggagagcaacggccagcccgagaacaacuacaagaccaccccccccgugcuggacagcgacggcagcuucuuccuguacagcaagcugaccguggacaagagcagauggcagcagggcaacguguucagcugcagcgugaugcacgaggcccugcacaaccacuacacccagaagagccugagccugagccccggcaaguga

SEQ ID NO: 666 - RNA, 1347 nt, Artificial Sequence
  Ipilimumab HC without signale peptide
caggugcaacuggucgagagcggcgggggaguugugcagcccggcagaucccuccggcugucuugcgccgcuagcggguucaccuuuuccucuuacacaaugcacugggugcgccaggccccuggaaagggccuugaaugggucacguucaucagcuaugacgggaacaauaaauacuaugcggauuccgugaagggaagauuuaccauuucucgggacaacagcaaaaauacacuguaccuccagaugaacucccugcgcgcugaggauaccgccaucuauuacugugccagaacaggcuggcuuggcccguucgacuauugggggcaaggaacccugguuacagugagcucugcuuccaccaagggccccagcgucuuuccucucgcccccucuuccaaaagcacgucugggggaaccgcugcccugggcugccuggugaaggauuacuucccugaacccguuacaguguccuggaauagcggggcgcucaccuccggaguccauacauuuccugccgugcugcagucuagcggccuuuacucccugagcucuguggucaccguuccguccagcucucucggcacgcagacauauauuuguaacgugaaucacaagcccagcaacaccaaaguggacaagcgggucgagccuaaauccugcgauaagacacauaccugucccccuugccccgcuccggaacugcuugggggaccuucuguguuccuguuucccccuaaacccaaggacacccucaugaucagccgcacacccgagguuacguguguggucguggauguuucccacgaggacccugaagugaaguucaauugguacgucgauggcguggagguccauaacgccaaaaccaagccgagagaagaacaguauaauagcacauaccgggugguuucugugcugaccguccugcaccaagacuggcucaacgggaaagaguauaagugcaaaguguccaauaaggcucugcccgccccuauugagaaaacaaucagcaaggcgaagggacagccccgcgagccucagguuuacacccuucccccgucuagagaugaacugacgaaaaaccaggugucccucacaugucuggucaagggcuuuuauccuagcgacaucgccguggagugggaauccaaugggcaacccgagaacaacuacaaaaccaccccucccgugcuugacucugauggcagcuucuuucuguacuccaagcucacaguugacaaaucucgguggcagcagggaaaugucuucagcugcuccgugaugcacgaggcucugcauaaccacuauacccaaaagagccugucucucuccccuggcaaguga

SEQ ID NO: 667 - RNA, 1347 nt, Artificial Sequence
  Ipilimumab HC without signale peptide
caaguucaacuaguagaaucaggaggaggagucguccaaccaggcagaucacuaagacuaucaugugcagccucuggcuucacauucucuucuuauacaaugcacuggguaagacaagcaccaggaaaaggacuagaauggguaacauucauaucuuacgacggaaauaacaaauauuacgcugauucuguaaaagguagauucacaauuucuagagacaauaguaaaaauacauuauaccuccaaaugaauagucuuagagcagaagauacagcaauauacuauugugcacgaacaggaugguuaggaccauucgauuacuggggucaaggaacauuaguaacaguaucaucugcaucaacaaaagguccuucaguauucccacucgcaccaucaucaaaauccacaucaggaggaacugcagcccucggaugccuagucaaagacuacuucccagaaccaguaaccguaucuuggaacuccggagcauuaacaucuggaguacauacauucccugcaguacuccaaucaucaggacuauacucacuauccuccguaguaaccgucccuucaucaucucuagguacacaaacuuacauaugcaacguaaaucacaaaccaucuaauacaaaaguagacaaaagagucgaaccaaaaucaugcgacaaaacccacacaugccccccaugcccagcacccgaacuacucggaggaccaucaguauuucuauuuccaccaaaaccaaaagauacacuaaugauaucacgaacaccugaaguaaccuguguugucgucgacguaucgcacgaagacccagaaguaaaauuuaauugguacguagacgguguagaaguucacaaugcaaaaacaaaaccaagagaagaacaauacaacucaacauauagaguaguuucugucuuaaccgucuuacaccaagauugguuaaacgguaaagaauauaaaugcaaaguaucuaauaaagcucuacccgccccaaucgaaaaaacaauaucaaaagccaaaggccaaccucgagaaccacaaguauacacacuacccccuucaagagaugaacuaacaaaaaaccaaguaagccuaacaugccuaguaaaaggcuuuuauccaucagacauagcaguagaaugggaaucuaacggucaaccugaaaauaacuauaaaacaacaccaccaguacuagacucagauggaucauucuuucuauacucaaaauuaacaguagauaaaucaagauggcaacaaggaaacguuuuuucuuguucuguaaugcacgaagcacuacacaaucacuauacccaaaaaucucucagccuaucacccggaaaauga

SEQ ID NO: 668 - RNA, 1347 nt, Artificial Sequence
  Ipilimumab HC without signale peptide
caggugcaacuggucgagagcggcgggggugugguacagcccggcaggucccuccggcugaguugcgccgcaagcggguucaccuuuuccaguuacacuaugcacugggugcgccaggccccaggcaaggguuuggaaugggucaccuucaucagcuaugacgggaacaauaaauacuaugcggauuccgugaagggcagguuuacgauuagccgggacaacuccaaaaauacucuguaccuccagaugaacagucugcgcgccgaggauaccgcaaucuauuacugugccaggaccggcugguuggggccguucgacuauuggggucaaggcacucuggugaccgucagcuccgcaagcacgaaggggcccaguguguuuccacucgcccccuccagcaaauccaccaguggcgguaccgcggcccuggggugccugguaaaggauuacuucccagaacccgugacugucagcuggaacuccggcgcacucaccagcggcgugcauaccuuuccagccgugcugcagaguuccggguuguacagccugaguuccgucgugacgguaccgagcagcucccucgguacucagaccuauauuuguaaugugaaucacaagcccaguaacacuaaagucgacaagcggguggagccaaaaagcugcgauaagacccauaccugucccccaugccccgccccggaacugcugggcgggcccuccguguucuuguuuccacccaaaccaaaggacacucucaugaucagccgcacgcccgaggucaccugugugguaguggaugucagucacgaggacccagaagugaaauucaauugguacgucgauggcguggaggugcauaacgcaaagacuaagccgagggaagaacaguauaauuccaccuaccggguagugagcguccugaccgugcugcaccaagacuggcucaacgguaaagaguauaagugcaaagucuccaauaaggcccugcccgcgccaauugagaaaacuaucaguaaggccaagggccagccccgcgagccacagguguacacguugcccccgagcagggaugaacugaccaaaaaccaggugucccucacuugucugguaaagggguuuuauccaagcgacaucgcaguggagugggaaaguaauggccaacccgagaacaacuacaaaaccacucccccaguccuggacuccgaugggagcuucuucuuguacuccaagcucacuguggacaaaagucgguggcagcaggguaaugucuuuagcugcuccgugaugcacgaggcccugcauaaccacuauacgcaaaagagccugagucucucccccggcaaguga

SEQ ID NO: 669 - RNA, 1347 nt, Artificial Sequence
  Ipilimumab HC without signale peptide
caaguccagcuaguagaauccggcggaggcgucguccaaccaggacgcucgcuaagacucagcugcgccgcaucuggcuucacauucagcucauacacaaugcacugggucagacaagcuccaggcaaaggccucgaaugggucacauucauaucauacgacggcaacaacaaauacuacgccgacuccguaaaaggccgcuucaccaucuccagagacaacuccaaaaacacccuauaccuccaaaugaacucacucagagccgaagacaccgcaaucuacuacugcgcaagaaccggcuggcuuggccccuucgauuacuggggacaaggcacccucgucaccgucucauccgcauccaccaaaggcccauccgucuucccccucgcaccaucauccaaauccaccagcggagguaccgccgcacucggcugccuagucaaagacuacuuccccgaaccugucacagucuccuggaacuccggagcccugacaucgggcguccacacauuccccgccguccuacaaagcuccggccucuacagccucuccucagucgucaccguacccuccuccagccucggaacacaaaccuacaucugcaacguuaaccacaaaccuuccaacaccaaagucgacaaacgagucgaacccaaaucgugcgacaaaacccauaccugcccacccugccccgcccccgaacuccucggcggcccauccgucuuccuauucccacccaaaccaaaggacacacucaugauaucacgaaccccugaagucacgugcgucgucgucgacguuucacacgaagaccccgaagucaaauucaacugguacguagacggagucgaaguccacaacgccaaaaccaaaccccgagaagaacaauacaacucuaccuaccgcgucguauccguccucaccguccuccaccaagacuggcuaaacggcaaagaauacaagugcaaaguuucgaacaaagcccuccccgcacccaucgagaaaaccaucuccaaagccaaaggacaaccccgcgaaccccaaguguacacccucccacccucgcgugacgaacucaccaaaaaucaagucucucuaaccugccucguaaaaggcuucuaccccuccgacauagcaguagaaugggaaucuaacggccagcccgaaaacaacuacaaaacaaccccacccguacucgacuccgacggcucauucuuccucuacucaaaacucaccgucgauaaaucccgcuggcaacaaggcaaugucuucucaugcagcgucaugcacgaagcacuccacaaccacuacacacaaaagagccucucccuaucccccggcaaauga

SEQ ID NO: 670 - RNA, 1347 nt, Artificial Sequence
  Ipilimumab HC without signale peptide
caaguccagcuagucgaaucaggcggaggcgucguccaacccggacggucccuacgacucagcugugcugccagcggcuucaccuucucguccuacacaaugcacuggguccggcaagcacccggcaaaggucucgaaugggucaccuucauauccuaugacggcaacaacaaauacuacgccgacuccgucaaaggccgcuucacaaucucaagagacaacuccaaaaacacccucuaccuccaaaugaacucgcuaagagcagaagacaccgccaucuacuacugcgcccgcaccggauggcucggccccuucgacuacuggggccaaggcacccuagucacaguaucauccgccucuacaaagggaccauccgucuucccccucgccccauccuccaaauccaccucuggaggcaccgccgcacucggaugccucgucaaagacuacuuccccgaacccgucacagucuccuggaacuccggcgcccuaaccuccggaguccacacauucccugcuguccuacaauccucgggccuauacucccucucaucuguagucaccguccccucauccucccuuggaacccaaacguacauaugcaacgucaaccacaaaccuuccaacacaaaagucgacaaacguguagagccaaaguccugugacaaaacacacacaugcccaccaugucccgcgcccgaacuacucggcggacccucagucuuccucuuucccccgaaacccaaagacacccucaugauaucacgcacccccgaaguuaccugcgucgucgucgacgucucccacgaagaccccgaagucaaauucaacugguacgucgacggcguagaaguccacaacgccaaaaccaaaccacgggaagaacaauacaacuccacauaccgcgucgucagcguacucaccguccuacaucaagacuggcuaaacggcaaagaauacaaaugcaaaguauccaacaaagcacucccagcaccaaucgagaaaacaaucucaaaagcaaaaggccaaccccgggaaccacaaguauauacccucccacccagcagagacgaacucaccaaaaaccaaguuucacucacaugccucguaaaaggauucuaccccucugacauugcugucgaaugggaauccaacggacaacccgaaaacaacuacaaaaccaccccgcccguccucgacuccgacggcucauucuuccuauacuccaaacucaccguagacaaaucccgauggcagcaaggcaacgucuucuccugcagcguaaugcacgaagcacuccacaaccacuauacccaaaaaucccucucccugucccccggaaaguaa

SEQ ID NO: 671 - RNA, 1347 nt, Artificial Sequence
  Ipilimumab HC without signale peptide
caaguacaacucgucgaauccggcggcggcguaguccaaccaggcagaucccuacgccucuccugcgccgcauccggauucaccuucuccuccuacaccaugcacuggguacgccaagcccccggcaagggccucgaaugggucacguucaucucuuacgacggcaacaacaaauacuacgccgacuccguaaaaggucguuucaccaucucccgcgacaacagcaaaaacacccuauaccuucaaaugaacucccuccgcgccgaagacaccgccaucuacuacugugcccgcaccgguuggcucggccccuucgacuacuggggucaaggaacccuaguuaccguaucauccgcaucuaccaaaggccccuccguauucccacuagccccaucguccaaaucaacaucaggcggcacagccgcccucggaugccuagucaaagacuacuuccccgaacccgucaccgucucauggaacuccggagcccuaaccucgggaguccacaccuucccagcgguacuacaaucauccggacuuuacucccuaucauccgucgucacaguaccauccucaucccucgggacccaaaccuacauaugcaacgucaaccacaaaccauccaacaccaaagucgacaaaagagucgaaccaaaauccugcgacaaaacccacacaugcccacccugcccagcccccgaacuccucggcggccccuccguauuccucuucccacccaaacccaaggacacccucaugauaucccgcaccccagaaguaaccugcguaguagucgacguuucacacgaagaccccgaagucaaauucaacugguacguagacggcgucgagguccacaacgccaaaaccaaaccucgcgaagaacaauacaacagcacauaccgcgucgucuccguccuaaccguacuacaccaagacuggcuaaacggcaaagaauacaagugcaaagucuccaacaaagcccuccccgcccccaucgagaaaaccauauccaaagccaaaggucaaccccgcgaaccccaaguauacacccuacccccaucccgcgacgagcucaccaaaaaccaaguaucccuaaccugccucgucaaaggcuucuaccccuccgacauagccgucgaaugggaaagcaauggccagcccgaaaacaacuacaaaacaaccccacccguccucgacuccgacggcucuuucuuccucuacucaaaacucacagucgacaaaucacgauggcaacaaggcaacgucuucuccugcagcguaaugcacgaagcccuccacaaccacuacacccaaaaaucacucagccuaagccccggcaaguaa

SEQ ID NO: 672 - RNA, 1347 nt, Artificial Sequence
  Ipilimumab HC without signale peptide
caaguccaacuagucgaaucaggaggaggcguaguacaaccaggaagauccuuaagacuuucaugugcagcaucuggauuuaccuucucaucauacacaaugcacugggucagacaagcccccggaaaaggacuagaauggguaacauuuauaucauaugauggaaauaacaaauauuacgcagauucuguaaaaggaagauucaccaucucaagagauaauucaaaaaacacacuauaccuacaaaugaacucacucagagcugaagacaccgcaauauacuauugcgcaagaacaggaugguuaggaccuuucgauuacuggggacaaggaacacuaguuaccgucuccuccgcaaguaccaaaggaccaucuguauucccauuagcaccaucauccaaaucaacaucaggaggaaccgcagcauuaggaugcuuaguaaaagacuacuuuccugaacccguaacaguaucauggaauuccggagcacuaacaucaggaguacauaccuuuccagcaguacuccaaucaucaggauuauauuccuuaucuucaguaguaacagucccaucaucuucacuagguacacaaaccuacaucugcaauguaaaccacaaaccaucaaauacaaaagucgacaaaagaguugaaccaaaaucaugugacaaaacucacacaugcccaccauguccagccccagaauuacuaggaggaccaucaguauuccuuuucccaccaaaaccaaaagauacucuaaugauaucccguaccccagaaguaacaugcgucguaguagacguaucacacgaagaccccgaaguaaaauucaauugguacgucgacggaguagaaguacacaacgccaaaacaaaaccccgagaagaacaauacaacuccacauaccguguaguaucaguauuaacagucuuacaccaagacuggcuaaacggaaaagaauacaaauguaaaguuuccaacaaagcacucccagccccuaucgaaaaaaccauaucaaaagcaaaaggccaacccagagaaccccaaguuuauacacuaccaccaucaagagacgaauuaacaaaaaaccaaguaucccuaacaugccuaguaaaaggauucuacccuucagacaucgcaguagaaugggaauccaacggacaaccugaaaacaacuauaaaacaacaccaccaguauuagauagcgauggaucuuucuucuuauauucaaaacuuacaguagacaaaucucgauggcaacaaggaaacguauucucaugcuccguaaugcacgaagcgcuacauaaccauuacacacaaaaaucacuaucauuaucaccaggaaaauaa

SEQ ID NO: 673 - RNA, 1347 nt, Artificial Sequence
  Ipilimumab HC without signale peptide
caaguucaauuaguagaaucuggaggaggaguaguccaaccaggacguucacuaagacucucuugugcagcuucaggauuuacguucucaagcuauaccaugcacuggguaagacaagccccaggaaaaggauuagaauggguaacauuuauaucuuacgacggcaauaacaaauauuaugcagacucaguuaaagguagauucacaauaagccgagacaauucaaaaaacacucuauaucuacaaaugaauagccuaagagcagaagauacagcaauauauuacugugcacguacaggaugguuagguccuuucgauuacuggggacaagguacucuaguuacaguaagcagcgcaucuaccaaaggaccaagcguauucccucuugcuccaucaagcaaauccacaucaggcggaacagcugcauuaggaugcuuaguaaaagacuauuucccagaacccguaacgguaucuuggaacagcggcgcauuaacaucaggaguacauacuuuuccugcaguacuacaaagcuccggauuauacucuuuaucaucaguaguaacaguaccauccucaucacuaggaacacaaacauauauauguaacguaaaucauaaaccaucaaacaccaaaguagacaaaagaguagaaccaaaaucaugugauaaaacucacaccuguccuccauguccagcacccgaauuauuaggagguccaaguguauucuuauuuccaccaaaaccuaaagauacccuaaugauaucaagaacaccagaaguaacauguguaguaguagacgucucacacgaagacccagaaguaaaauucaacugguacguagacggaguagaaguacauaacgcuaaaacuaaaccacgagaagaacaauacaauaguacauacagaguagugucaguauuaacaguauuacaccaagacuggcuaaauggaaaagaauacaaauguaaaguaucaaauaaagcacuaccagcaccaaucgaaaaaaccaucuccaaagccaaaggacaaccccgugaaccucaagucuauacccuaccacccucaagagacgaacuuacaaaaaaccaaguaagcuuaacaugucuaguaaaaggauucuauccauccgacauagcaguagaaugggaaucaaauggucaaccagaaaacaacuacaaaacaacaccaccaguucucgauucagauggaucauuuuuucuauauagcaaauuaacuguagacaaaucuagauggcaacaaggaaauguauucucauguucaguaaugcaugaagcacuccacaaucauuacacacaaaaaaguuuaaguuuauccccaggcaaauaa

SEQ ID NO: 674 - RNA, 1347 nt, Artificial Sequence
  Ipilimumab backbone Rituximab HC without signale peptide
caggugcagcuggucgagagcggcgggggcguggugcagcccgggcgcucccuccggcugagcugcgccgccuccggcuucaccuucagcuccuacaccaugcacuggguccgccaggcgccggggaagggccuggagugggugacguucaucagcuacgacggcaacaacaaguacuacgccgacuccgugaaggggcgguucaccaucagccgcgacaacuccaagaacacccucuaccugcagaugaacagccugcgggccgaggacaccgccaucuacuacugcgcccgcacgggcuggcucgggcccuucgacuacuggggccaggggacccuggucaccguguccagcgcguccaccaagggccccagcguguucccccuggccccguccagcaaguccacgagcggcgggaccgccgcccucggcugccuggucaaggacuacuuccccgagcccgugaccguguccuggaacagcggggcgcugaccagcggcguccacacguuccccgccgugcuccaguccagcggccuguacucccugagcuccguggucaccgugccgagcuccagccucgggacccagaccuacaucugcaacgugaaccacaagcccuccaacacgaaggucgacaagcggguggagcccaagagcugcgacaagacccacacgugcccgcccugccccgcccccgagcugcugggcggcccgagcguguuccucuucccgcccaagcccaaggacacccugaugaucagccgcacccccgaggucacgugcgugguggucgacgugagccacgaggaccccgaggugaaguucaacugguacgucgacgggguggaggugcacaacgccaagaccaagccccgggaggagcaguacaacagcaccuaccgcgucgugagcgugcugaccguccuccaccaggacuggcugaacggcaaggaguacaagugcaaggugucgaacaaggcccugccggcccccaucgagaagacgaucagcaaggcgaagggccagccgcgggagccccaggucuacacccucccgcccagccgcgacgagcugaccaagaaccaggugucccugacgugccucgugaagggcuucuaccccagcgacaucgccgucgagugggagagcaacgggcagcccgagaacaacuacaagaccacgcccccggugcuggacuccgacggcagcuucuuccuguacuccaagcucaccguggacaagagccgguggcagcaggggaacgucuucuccugcagcgugaugcacgaggcccugcacaaccacuacacccagaagucccugagccucucccccggcaaguga

SEQ ID NO: 675 - RNA, 1347 nt, Artificial Sequence
  Ipilimumab backbone Rituximab HC without signale peptide
caggugcaacuggucgagagcggcgggggaguugugcagcccgguagaucccucaggcuuucuugcgccgcuucaggcuucaccuuuaguagcuacacaaugcacuggguacggcaggcaccugggaagggacuggaaugggugacuuucaucuccuaugacggcaacaauaaauacuaugccgauucugucaagggucgcuuuacgauuucgcgagacaacagcaaaaauaccuuguacuuacagaugaacucacugcgugcggaggauacagcuauauauuacugugccagaacuggguggcuaggaccauucgacuauuggggccaaggcacccucgugacaguuaguuccgcaucuaccaaggggccgagcguguuuccccuggccccuuccucaaaaaguacuagcggagguacagcugcacuuggcugccuggucaaggauuacuucccagaacccgugaccguaucuuggaacuccggggccuugacgucaggaguucauacuuuuccugcugugcuccagagcaguggccuguacucucuguccagcgucgugaccgugccaucgucuucccucgguacacagacuuauaucuguaaugucaaucacaagcccucaaacaccaaaguugacaagaggguggagccuaaaaguugcgauaagacacauaccuguccaccgugccccgcccccgagcugcugggcggcccgagcguguuccucuucccgcccaagcccaaggacacccugaugaucagccgcacccccgaggucacgugcgugguggucgacgugagccacgaggaccccgaggugaaguucaacugguacgucgacgggguggaggugcacaacgccaagaccaagccccgggaggagcaguacaacagcaccuaccgcgucgugagcgugcugaccguccuccaccaggacuggcugaacggcaaggaguacaagugcaaggugucgaacaaggcccugccggcccccaucgagaagacgaucagcaaggcgaaggggcagccuagggagccccagguuuacacgcuuccacccagccgggaugaacugaccaaaaaccaggugucuuugacaugucucguaaagggauuuuauccuucagacaucgccgucgagugggaaaguaauggucaaccagagaacaacuacaaaacuaccccgcccgugcuggacagcgauggcuccuucuuuuuauacucuaagcugacaguugacaaaucgcgcuggcagcaggggaauguguucagcugcuccgucaugcacgaggcacuccauaaccacuauacucaaaagucacuuagucugucuccuggaaaguga

SEQ ID NO: 676 - RNA, 1347 nt, Artificial Sequence
  Ipilimumab backbone Rituximab HC without signale peptide
caggugcagcugguggagagcggcggcggcguggugcagcccggcagaagccugagacugagcugcgccgccagcggcuucaccuucagcagcuacaccaugcacugggugagacaggcccccggcaagggccuggagugggugaccuucaucagcuacgacggcaacaacaaguacuacgccgacagcgugaagggcagauucaccaucagcagagacaacagcaagaacacccuguaccugcagaugaacagccugagagccgaggacaccgccaucuacuacugcgccagaaccggcuggcugggccccuucgacuacuggggccagggcacccuggugaccgugagcagcgccagcaccaagggccccagcguguucccccuggcccccagcagcaagagcaccagcggcggcaccgccgcccugggcugccuggugaaggacuacuuccccgagcccgugaccgugagcuggaacagcggcgcccugaccagcggcgugcacaccuuccccgccgugcugcagagcagcggccuguacagccugagcagcguggugaccgugcccagcagcagccugggcacccagaccuacaucugcaacgugaaccacaagcccagcaacaccaagguggacaagagaguggagcccaagagcugcgacaagacccacaccugcccccccugccccgcccccgagcugcugggcggcccgagcguguuccucuucccgcccaagcccaaggacacccugaugaucagccgcacccccgaggucacgugcgugguggucgacgugagccacgaggaccccgaggugaaguucaacugguacgucgacgggguggaggugcacaacgccaagaccaagccccgggaggagcaguacaacagcaccuaccgcgucgugagcgugcugaccguccuccaccaggacuggcugaacggcaaggaguacaagugcaaggugucgaacaaggcccugccggcccccaucgagaagacgaucagcaaggcgaagggccagcccagagagccccagguguacacccugccccccagcagagacgagcugaccaagaaccaggugagccugaccugccuggugaagggcuucuaccccagcgacaucgccguggagugggagagcaacggccagcccgagaacaacuacaagaccaccccccccgugcuggacagcgacggcagcuucuuccuguacagcaagcugaccguggacaagagcagauggcagcagggcaacguguucagcugcagcgugaugcacgaggcccugcacaaccacuacacccagaagagccugagccugagccccggcaaguga

SEQ ID NO: 677 - protein, 235 aa, Artificial Sequence
  Ipilimumab protein LC with signale peptide
METPAQLLFLLLLWLPDTTGEIVLTQSPGTLSLSPGERATLSCRASQSVGSSYLAWYQQKPGQAPRLLIYGAFSRATGIPDRFSGSGSGTDFTLTISRLEPEDFAVYYCQQYGSSPWTFGQGTKVEIKRTVAAPSVFIFPPSDEQLKSGTASVVCLLNNFYPREAKVQWKVDNALQSGNSQESVTEQDSKDSTYSLSSTLTLSKADYEKHKVYACEVTHQGLSSPVTKSFNRGEC

SEQ ID NO: 678 - RNA, 708 nt, Artificial Sequence
  Ipilimumab LC with signale peptide
auggagacccccgcccagcugcucuuccugcugcuccuguggcugccggacaccacgggcgagaucgugcugacccagagccccggcacccucucccugagcccgggggagcgcgccacgcuguccugccgggccagccaguccgucggcagcuccuaccucgcgugguaccagcagaagcccgggcaggcgccccgccugcugaucuacggcgccuucagccgggccaccgggauccccgaccgcuucuccggcagcggcuccgggaccgacuucacccucacgaucagccggcuggagccggaggacuucgccguguacuacugccagcaguacggcuccagccccuggaccuucgggcagggcaccaagguggagaucaagcgcaccgucgccgcccccuccguguucaucuucccgcccagcgacgagcagcugaaguccgggacggccagcguggucugccuccugaacaacuucuacccccgggaggccaaggugcaguggaagguggacaacgcgcugcaguccggcaacagccaggagagcgucaccgagcaggacuccaaggacagcaccuacucccucagcuccacccugacgcugagcaaggccgacuacgagaagcacaagguguacgccugcgaggugacccaccagggccucuccagccccgucaccaaguccuucaaccgcggggagugcuga

SEQ ID NO: 679 - RNA, 708 nt, Artificial Sequence
  Ipilimumab LC with signale peptide
auggagacccccgcccagcuccucuuccuccuccuccucuggcuccccgacaccaccggcgagaucguccucacccagucccccggcacccucucccucucccccggcgagcgcgccacccucuccugccgcgccucccaguccgucggcuccuccuaccucgccugguaccagcagaagcccggccaggccccccgccuccucaucuacggcgccuucucccgcgccaccggcauccccgaccgcuucuccggcuccggcuccggcaccgacuucacccucaccaucucccgccucgagcccgaggacuucgccgucuacuacugccagcaguacggcuccucccccuggaccuucggccagggcaccaaggucgagaucaagcgcaccgucgccgcccccuccgucuucaucuucccccccuccgacgagcagcucaaguccggcaccgccuccgucgucugccuccucaacaacuucuacccccgcgaggccaagguccaguggaaggucgacaacgcccuccaguccggcaacucccaggaguccgucaccgagcaggacuccaaggacuccaccuacucccucuccuccacccucacccucuccaaggccgacuacgagaagcacaaggucuacgccugcgaggucacccaccagggccucuccucccccgucaccaaguccuucaaccgcggcgagugcuga

SEQ ID NO: 680 - RNA, 708 nt, Artificial Sequence
  Ipilimumab LC with signale peptide
auggagacccccgcccagcuucucuuccuucuguuguuauggcugccugacacaacuggcgaaaucgugcuaacgcaaagcccagggacccucucccugucuccgggagagagagcuacacuuucaugcagggcaagucagagcgucgguuccucuuaccuggccugguaucagcagaagcccggccaagcgccucgguugcucauuuacggggcuuuuucgcgcgccacuggaauaccagaucgauucucaggcagcgguagugggaccgacuuuacacugaccaucucccgucuggaacccgaggauuucgcaguuuauuacugucagcaguauggaucuagcccuuggacuuuuggccagggcacaaaaguggaaauuaagagaaccguagccgcuccauccguguucaucuuucccccuucagacgagcaacucaaaagugggacggcaagcgucgugugcuuacugaacaauuucuacccaagggaggccaagguucaguggaaaguggauaacgcucugcagucuggaaauucccaggaaucagucacugagcaagacagcaaggauaguaccuauucuuuguccagcacacugacucuaucgaaggccgacuacgaaaaacacaagguguacgcgugugagguaacccaucagggucucucuuccccgguuacaaaaucauuuaaccggggcgagugcuga

SEQ ID NO: 681 - RNA, 708 nt, Artificial Sequence
  Ipilimumab LC with signale peptide
auggagacccccgcccagcugcuguuccugcugcugcuguggcugcccgacaccaccggcgagaucgugcugacccagagccccggcacccugagccugagccccggcgagagagccacccugagcugcagagccagccagagcgugggcagcagcuaccuggccugguaccagcagaagcccggccaggcccccagacugcugaucuacggcgccuucagcagagccaccggcauccccgacagauucagcggcagcggcagcggcaccgacuucacccugaccaucagcagacuggagcccgaggacuucgccguguacuacugccagcaguacggcagcagccccuggaccuucggccagggcaccaagguggagaucaagagaaccguggccgcccccagcguguucaucuucccccccagcgacgagcagcugaagagcggcaccgccagcguggugugccugcugaacaacuucuaccccagagaggccaaggugcaguggaagguggacaacgcccugcagagcggcaacagccaggagagcgugaccgagcaggacagcaaggacagcaccuacagccugagcagcacccugacccugagcaaggccgacuacgagaagcacaagguguacgccugcgaggugacccaccagggccugagcagccccgugaccaagagcuucaacagaggcgagugcuga

SEQ ID NO: 682 - RNA, 708 nt, Artificial Sequence
  Ipilimumab LC with signale peptide
auggagacccccgcccagcuccuguuccugcuucugcucuggcugccugacacaacgggcgaaaucgugcuuacccaaagcccggggacacugucccucucucccggagagagagcuacccugagcugccgggccucccagucugucggcagcuccuaccuggcgugguaucagcagaaaccugggcaagcuccccgccuccugauuuacggagccuuuucuagagccacaggcaucccugaucgguucagcggguccggaagcggcaccgacuuuacacuuaccauuucucgccuggaacccgaggauuucgcuguuuauuacugucagcaguauggcuccagcccuuggacguuugggcagggaaccaaaguggaaaucaagagaacaguggccgcuccgucugucuucauuuuucccccuuccgacgagcaacucaaaagcggcaccgccucugugguuugccugcuuaacaauuucuacccccgggaggcgaaggugcaguggaaagucgauaacgcccugcaguccgggaauagccaggaauccgugacagagcaagacucuaaggauagcaccuauucccucagcucuacgcugacacuguccaaggcugacuacgaaaaacacaagguuuacgccugugaggugacccaucagggacucagcucuccugucacaaagagcuuuaaccgcggcgagugcuga

SEQ ID NO: 683 - RNA, 708 nt, Artificial Sequence
  Ipilimumab LC with signale peptide
auggaaacaccagcacaacuacuauucuuacuauuacuauggcuaccagacacaacaggagaaauaguacuaacacaaucaccaggaacacuaagucuaucaccaggagaaagagcaacacuaucaugcagagcaucccaaucaguuggaucuuccuaccuagccugguaucaacaaaaaccaggacaagcaccaagauuacuaauauacggagcauucucaagagcaacuggaaucccagauagauucucaggaucaggaucaggaacagacuucacauuaacaauaucacgacuagaaccagaagacuucgcaguauacuacugucaacaauacggauccucaccauggaccuucggccaaggaacaaaaguagaaauaaaaagaacaguagcagccccaucuguauucauauucccaccaucagaugaacaacuaaaaucaggaacagcaucaguaguaugcuuacuaaacaacuucuacccaagagaagccaaaguacaauggaaaguagacaacgcacuacaaucaggaaauucccaagaaucaguaacagaacaagacucaaaagacuccacauacucauuaucaucaacauuaacacuaucaaaagcagacuacgaaaaacacaaaguauacgcaugugaaguaacacaccaaggacuaucaucaccaguaacaaaaucauucaaccgaggagaaugcuga

SEQ ID NO: 684 - RNA, 708 nt, Artificial Sequence
  Ipilimumab LC with signale peptide
auggagacccccgcccagcuccuguuccuguugcugcucuggcugccagacacuaccggcgaaaucguguugacgcaaagcccggggacucugucccucagucccggugagagggcaacccugagcugccgggccucccagagugucggcagcuccuaccuggcgugguaucagcagaagccagggcaagcaccccgccuccugauuuacggcgccuuuagcagggccaccgguaucccagaucgguucuccgggaguggcagcggcacugacuuuaccuugacgauuucccgccuggaacccgaggauuucgcaguguauuacugucagcaguaugggagcaguccauggacuuuuggucagggcaccaaaguagaaaucaagaggacuguggccgcgccguccgucuucauuuuucccccaagcgacgagcaacucaaauccgggaccgccaguguggugugccugcugaacaauuucuacccccgggaggcaaagguccaguggaaaguggauaacgccuugcagagcggcaauucccaggaaagcguaaccgagcaagacaguaaggauuccacguauagccucaguuccacucugacccugagcaaggccgacuacgaaaaacacaagguguacgcaugugaggucacucaucagggucucagcuccccagugaccaaaaguuuuaaccgcggggagugcuga

SEQ ID NO: 685 - RNA, 708 nt, Artificial Sequence
  Ipilimumab LC with signale peptide
auggaaacccccgcccaacuccucuuccuauuacuccucuggcuacccgacaccaccggcgaaaucguccucacccaauccccaggcacccucucucucucccccggagaacgcgcaacacucuccugccgugcaucccaauccgucggaucuuccuaccucgccugguaccaacaaaaacccggccaagccccacgccuccucaucuacggcgccuucucccgcgccaccggcauuccagaccguuucucaggauccggcuccggcaccgauuucacacucaccaucucccgccuagaaccagaagacuucgccguauacuacugccagcaauacggaucuucccccuggacauucggccaaggcaccaaagucgaaaucaaacgcaccgucgcagcccccuccgucuucaucuucccacccuccgacgaacaacuaaaaucuggcacagcauccgucgucugccuccuaaacaacuucuacccccgcgaagccaaaguccaauggaaagucgacaacgcacuccaaucuggcaacucacaagaauccgucacagaacaagacuccaaagacucaaccuacucccucuccucaacccucacccucuccaaagccgacuacgaaaaacacaaggucuacgcaugcgaagucacccaucaaggacucuccucccccgucaccaaauccuucaaccgcggcgaaugcuaa

SEQ ID NO: 686 - RNA, 708 nt, Artificial Sequence
  Ipilimumab LC with signale peptide
auggaaacacccgcccaacuccucuuccuccuccuccucuggcuacccgacaccaccggcgaaaucguccucacccaaucccccggcacccuaucccucucccccggcgaacgcgccacccuauccugccgcgcaucccaauccguaggauccuccuaccucgccugguaccaacaaaaacccggccaagcaccccgccuccucaucuacggagccuucucccgcgccaccggcaucccugaccgcuucuccggcucaggcucaggcaccgacuucacccucaccaucucucgccuagaacccgaagacuucgccguauacuauugccaacaauacggcuccuccccuuggaccuucggccaaggaacaaaagucgaaaucaaacgaaccgucgccgcccccucagucuucaucuucccacccuccgacgaacaacucaaauccgguaccgccuccgucgucugccuucucaacaacuucuacccccgagaagccaaaguacaauggaaagucgacaacgcacuacaaucaggcaacucccaagaauccgucaccgaacaagauuccaaagacucaaccuacucacucuccuccacacucacccucuccaaagccgacuacgaaaaacacaaagucuacgccugcgaagucacccaccaaggacucuccagccccgucaccaaauccuucaaccgcggcgaaugcuaa

SEQ ID NO: 687 - RNA, 708 nt, Artificial Sequence
  Ipilimumab LC with signale peptide
auggaaacucccgcccaacuacucuuccuccuccuccucuggcuccccgacaccaccggcgaaaucguccuuacccagucccccggcacccucucacucucccccggcgaacgcgccacccuauccugucgcgccucccaaucagucggcucaucauaccucgccugguaccaacaaaaacccggccaagccccucgccuccucauauacggcgccuucucccgcgccaccggcauccccgaccgauucuccggcuccggcuccggcacugacuucacccucaccauaucccgccucgaacccgaagacuucgcagucuacuacugccaacaauacggaucuucccccuggaccuucggccaaggcaccaaagucgaaaucaaacgcaccgucgccgcccccuccgucuucauauucccacccucagacgaacaacucaaaucaggcaccgcauccgucgucugccuccucaacaacuucuacccccgcgaagccaaaguccaauggaaagucgacaacgcccuccaaucaggcaacucacaagaauccgucacagaacaagacuccaaagacucaaccuacucccucuccucaacccucacacucuccaaagccgacuacgaaaaacacaaagucuacgccugcgaagucacccaccaaggacuuuccucacccgucaccaaauccuucaaccgcggcgaaugcuaa

SEQ ID NO: 688 - RNA, 708 nt, Artificial Sequence
  Ipilimumab LC with signale peptide
auggaaacaccagcacaacuauuauuccuauuacuucuauggcuaccagacacaacaggagaaauaguauuaacacaaagcccaggaacacucucauuaucaccaggagaaagagcaacacucucaugccgagcaucccaauccgucggaucaucauaucuagcaugguaccaacaaaaaccaggacaagcacccagacuacuaauauacggagcauuuucaagagccacaggaaucccagacagauuuucaggaucaggaucaggaacagacuucacauuaacaauaucacgauuagaacccgaagacuucgcaguauacuacugccaacaauacggaucaucucccuggacauucggacaaggcacaaaaguagaaauaaaacgaacagucgcagcaccaucaguauucauauucccaccaucagacgaacaacuaaaaucaggaacagcaucaguaguaugccuauuaaauaacuucuacccaagagaagcaaaaguccaauggaaaguagauaacgcacuacaaucaggaaacucucaagaaucaguaaccgaacaagacucaaaagauucaaccuacucauuaucaucaacauuaacacuaucaaaagcagacuacgaaaaacacaaaguauacgcaugcgaaguaacccaccaaggccuaucaucaccaguaacaaaaucauucaacagaggagaaugcuga

SEQ ID NO: 689 - RNA, 708 nt, Artificial Sequence
  Ipilimumab LC with signale peptide
auggaaaccccugcccaauuacuauucuuauuauuacucuggcuaccagacacaacaggagaaauaguuuuaacacaaucaccaggcacacuaucacuaucaccaggagaaagagcaacacuaucaugcagagccucacaaucagucggaucaucauaccuagcaugguaucaacaaaaacccggacaagcaccaagauuauuaauauauggagcauucucacgagcaaccggaauaccagauagauucucaggaucaggaagcggcaccgacuucacauuaacaauaucuagacuagaaccagaagauuucgcaguauacuacugccaacaauauggaucuucaccauggacauucggacaaggaacaaaaguugaaauaaaaagaacaguagcagcaccaucaguauucauauucccaccaucagacgaacaauuaaaaucaggaacagccucuguaguaugccuauuaaacaacuuuuacccaagagaagcaaaaguucaauggaaaguagacaaugcacuacaaucaggcaacucacaagaaucaguaacagaacaagacucuaaagacucaacauauagccuaucaucaacacucacccuaucaaaagcagacuacgaaaaacacaaaguauacgcaugugaaguaacacaccaaggacuaucaucaccaguaacaaaaucauucaacagaggagaaugcuaa

SEQ ID NO: 690 - RNA, 708 nt, Artificial Sequence
  Ipilimumab backbone Rituximab LC with signale peptide
auggagacccccgcccagcugcucuuccugcugcuccuguggcugccggacaccacgggcgagaucgugcugacccagagccccggcacccucucccugagcccgggggagcgcgccacgcuguccugccgggccagccaguccgucggcagcuccuaccucgcgugguaccagcagaagcccgggcaggcgccccgccugcugaucuacggcgccuucagccgggccaccgggauccccgaccgcuucuccggcagcggcuccgggaccgacuucacccucacgaucagccggcuggagccggaggacuucgccguguacuacugccagcaguacggcuccagccccuggaccuucgggcagggcaccaagguggagaucaagcgcaccguggcggcccccagcguguucaucuucccgcccagcgacgagcagcugaagagcgggaccgccucggucgugugccuccugaacaacuucuacccccgggaggccaaggugcaguggaaggucgacaacgcgcugcagagcggcaacagccaggagagcgugacggagcaggacagcaaggacagcaccuacucgcucagcagcacccugacccugagcaaggccgacuacgagaagcacaagguguacgccugcgaggucacgcaccaggggcucagcucgcccgugaccaagagcuucaaccgcggggagugcuga

SEQ ID NO: 691 - RNA, 708 nt, Artificial Sequence
  Ipilimumab backbone Rituximab LC with signale peptide
auggagacccccgcccagcuucucuuccuucuguuguuauggcugccugacacaacuggcgaaaucgugcuaacgcaaagcccagggacccucucccugucuccgggagagagagcuacacuuucaugcagggcaagucagagcgucgguuccucuuaccuggccugguaucagcagaagcccggccaagcgccucgguugcucauuuacggggcuuuuucgcgcgccacuggaauaccagaucgauucucaggcagcgguagugggaccgacuuuacacugaccaucucccgucuggaacccgaggauuucgcaguuuauuacugucagcaguauggaucuagcccuuggacuuuuggccagggcacaaaaguggaaauuaagagaaccguggcggcccccagcguguucaucuucccgcccagcgacgagcagcugaagagcgggaccgccucggucgugugccuccugaacaacuucuacccccgggaggccaaggugcaguggaaggucgacaacgcgcugcagagcggcaacagccaggagagcgugacggagcaggacagcaaggacagcaccuacucgcucagcagcacccugacccugagcaaggccgacuacgagaagcacaagguguacgccugcgaggucacgcaccaggggcucagcucgcccgugaccaagagcuucaaccgcggcgagugcuga

SEQ ID NO: 692 - RNA, 708 nt, Artificial Sequence
  Ipilimumab backbone Rituximab LC with signale peptide
auggagacccccgcccagcugcuguuccugcugcugcuguggcugcccgacaccaccggcgagaucgugcugacccagagccccggcacccugagccugagccccggcgagagagccacccugagcugcagagccagccagagcgugggcagcagcuaccuggccugguaccagcagaagcccggccaggcccccagacugcugaucuacggcgccuucagcagagccaccggcauccccgacagauucagcggcagcggcagcggcaccgacuucacccugaccaucagcagacuggagcccgaggacuucgccguguacuacugccagcaguacggcagcagccccuggaccuucggccagggcaccaagguggagaucaagagaaccguggcggcccccagcguguucaucuucccgcccagcgacgagcagcugaagagcgggaccgccucggucgugugccuccugaacaacuucuacccccgggaggccaaggugcaguggaaggucgacaacgcgcugcagagcggcaacagccaggagagcgugacggagcaggacagcaaggacagcaccuacucgcucagcagcacccugacccugagcaaggccgacuacgagaagcacaagguguacgccugcgaggucacgcaccaggggcucagcucgcccgugaccaagagcuucaaccgcggcgagugcuga

SEQ ID NO: 693 - protein, 215 aa, Artificial Sequence
  Ipilimumab protein LC without signale peptide
EIVLTQSPGTLSLSPGERATLSCRASQSVGSSYLAWYQQKPGQAPRLLIYGAFSRATGIPDRFSGSGSGTDFTLTISRLEPEDFAVYYCQQYGSSPWTFGQGTKVEIKRTVAAPSVFIFPPSDEQLKSGTASVVCLLNNFYPREAKVQWKVDNALQSGNSQESVTEQDSKDSTYSLSSTLTLSKADYEKHKVYACEVTHQGLSSPVTKSFNRGEC

SEQ ID NO: 694 - RNA, 648 nt, Artificial Sequence
  Ipilimumab LC without signale peptide
gagaucgugcugacccagagccccggcacccucucccugagcccgggggagcgcgccacgcuguccugccgggccagccaguccgucggcagcuccuaccucgcgugguaccagcagaagcccgggcaggcgccccgccugcugaucuacggcgccuucagccgggccaccgggauccccgaccgcuucuccggcagcggcuccgggaccgacuucacccucacgaucagccggcuggagccggaggacuucgccguguacuacugccagcaguacggcuccagccccuggaccuucgggcagggcaccaagguggagaucaagcgcaccgucgccgcccccuccguguucaucuucccgcccagcgacgagcagcugaaguccgggacggccagcguggucugccuccugaacaacuucuacccccgggaggccaaggugcaguggaagguggacaacgcgcugcaguccggcaacagccaggagagcgucaccgagcaggacuccaaggacagcaccuacucccucagcuccacccugacgcugagcaaggccgacuacgagaagcacaagguguacgccugcgaggugacccaccagggccucuccagccccgucaccaaguccuucaaccgcggggagugcuga

SEQ ID NO: 695 - RNA, 648 nt, Artificial Sequence
  Ipilimumab LC without signale peptide
gagaucguccucacccagucccccggcacccucucccucucccccggcgagcgcgccacccucuccugccgcgccucccaguccgucggcuccuccuaccucgccugguaccagcagaagcccggccaggccccccgccuccucaucuacggcgccuucucccgcgccaccggcauccccgaccgcuucuccggcuccggcuccggcaccgacuucacccucaccaucucccgccucgagcccgaggacuucgccgucuacuacugccagcaguacggcuccucccccuggaccuucggccagggcaccaaggucgagaucaagcgcaccgucgccgcccccuccgucuucaucuucccccccuccgacgagcagcucaaguccggcaccgccuccgucgucugccuccucaacaacuucuacccccgcgaggccaagguccaguggaaggucgacaacgcccuccaguccggcaacucccaggaguccgucaccgagcaggacuccaaggacuccaccuacucccucuccuccacccucacccucuccaaggccgacuacgagaagcacaaggucuacgccugcgaggucacccaccagggccucuccucccccgucaccaaguccuucaaccgcggcgagugcuga

SEQ ID NO: 696 - RNA, 648 nt, Artificial Sequence
  Ipilimumab LC without signale peptide
gagaucgugcugacccagagccccggcacacucucccuuucuccuggggaaagagccacucugucaugcagggcuagucaaagcgucggauccucuuacuuggcaugguaucagcagaagccaggucaggccccgcgguuacugauuuacggcgcguucucgcgcgcuacggggauacccgaccgauuuucaggaagcggcagugguaccgauuucacacuaacuaucucccgucucgagccugaagacuuugccguuuauuacugucaacaguaugggucuagcccauggaccuucggacagggcacaaaaguggagauuaagagaaccguagcagcccccuccguguuuaucuucccuccaucagaugaacagcugaaaaguggcacugcuagcgucgugugccuucugaacaauuuuuaccccagggaggcaaagguucaauggaaaguggacaacgccuugcagucuggaaauucccaggagucagucacagaacaggauagcaaggacaguaccuauucucucuccagcacgcugacucugucgaaggcugauuacgagaaacacaagguguacgccugugaaguaacccaucaagggcucucuuccccuguuacaaaaucauucaaccggggugagugcuga

SEQ ID NO: 697 - RNA, 648 nt, Artificial Sequence
  Ipilimumab LC without signale peptide
gagaucgugcugacccagagccccggcacccugagccugagccccggcgagagagccacccugagcugcagagccagccagagcgugggcagcagcuaccuggccugguaccagcagaagcccggccaggcccccagacugcugaucuacggcgccuucagcagagccaccggcauccccgacagauucagcggcagcggcagcggcaccgacuucacccugaccaucagcagacuggagcccgaggacuucgccguguacuacugccagcaguacggcagcagccccuggaccuucggccagggcaccaagguggagaucaagagaaccguggccgcccccagcguguucaucuucccccccagcgacgagcagcugaagagcggcaccgccagcguggugugccugcugaacaacuucuaccccagagaggccaaggugcaguggaagguggacaacgcccugcagagcggcaacagccaggagagcgugaccgagcaggacagcaaggacagcaccuacagccugagcagcacccugacccugagcaaggccgacuacgagaagcacaagguguacgccugcgaggugacccaccagggccugagcagccccgugaccaagagcuucaacagaggcgagugcuga

SEQ ID NO: 698 - RNA, 648 nt, Artificial Sequence
  Ipilimumab LC without signale peptide
gagaucgugcugacccagagccccggcacacucagccugucuccuggggaaagagccacgcuuagcugccgggcuucccaaucugucggaagcuccuaccuggccugguaucagcagaagccgggccaggcgccccgccuccugauuuacggggcuuucucuagagccaccggaaucccugaccgguuuagcggcuccgggagcggaacagauuucacccuuacaauuucucgccuggagcccgaagacuuugccguuuauuacugucaacaguauggcuccagcccuuggaccuucggccaggggacaaaaguggagaucaagagaaccguggcugcccccucugucuuuauuuucccuccguccgaugaacagcucaaaagcggaacggcuucugugguuugccugcugaacaauuuuuacccccgggaggccaaggugcaauggaaagucgacaacgcgcuccaguccggcaauagccaggaguccgugaccgaacaggauucuaaggacagcacauauucccugagcucuacccuuacacuguccaaggccgauuacgagaaacacaagguuuacgcuugugaagugacccaucaagggcucagcucuccugucacgaaauccuucaaccgcggagagugcuga

SEQ ID NO: 699 - RNA, 648 nt, Artificial Sequence
  Ipilimumab LC without signale peptide
gaaauaguacuaacacaaucaccaggaacccucucacuaucuccaggagaaagagcaacacuaagcugcagagccucacaaucagucggaucaucauaccuagcaugguaccaacaaaaaccaggacaagcccccagauuacuaaucuacggagcauucucacgagcaacaggaaucccagacagauucucagguuccggaucaggaacagacuucacacuaacaauauccagauuagaaccagaagacuucgcaguauacuacugccaacaauacggaucaucaccauggacauuuggacaaggaaccaaaguagaaaucaaaagaacaguagcagccccaucaguauuuauauucccaccaucagacgaacaacuaaaaucaggcaccgcaucaguaguaugucuauuaaacaacuucuacccaagagaagcaaaaguacaauggaaaguagacaacgcacuacaaucaggaaacucccaagaaucagucacagaacaagacucaaaagacucaacauacucacuaucaucaacacuaaccuuaucaaaagcagacuacgaaaaacacaaaguauacgcaugcgaaguaacacaccaaggauuaucauccccaguaacaaaaucauucaacagaggagaaugcuga

SEQ ID NO: 700 - RNA, 648 nt, Artificial Sequence
  Ipilimumab LC without signale peptide
gagaucgugcugacccagagccccggcacucucucccugaguccaggggaaagggccaccuugagcugccgggcaucccaaagugucgguagcuccuaccuggccugguaucagcagaagccgggccaggcgccccgccuccugauuuacggggccuucagcagggcaacgggcaucccagaccgguuuuccgguagugggagcggcacugauuucaccuugaccauuucccgccuggagcccgaagacuuugccguguauuacugucaacaguauggcagcaguccauggacuuucgggcaggguaccaaaguagagaucaagaggacgguggcagcccccuccgucuuuauuuucccaccgagcgaugaacagcucaaauccggcacugcgaguguggugugccugcugaacaauuuuuacccccgggaggccaagguccaauggaaaguggacaacgcacuccagagcggcaauucccaggagagcguaaccgaacaggauaguaaggacuccacuuauagccugaguuccaccuugacccugagcaaggccgauuacgagaaacacaagguguacgccugugaagucacgcaucaagggcucagcuccccagugacuaaaaguuucaaccgcggugagugcuga

SEQ ID NO: 701 - RNA, 648 nt, Artificial Sequence
  Ipilimumab LC without signale peptide
gaaaucguccuaacccaaucccccggcacacuaucucucuccccaggcgaacgcgcaacacuauccugccgcgccucacaaucagucggcuccuccuaccuagccugguaccaacaaaaacccggccaagcaccccgacuccucaucuacggcgccuucucccgcgccacaggcaucccagaccgcuucuccggcuccggcuccggcacagacuucacacucaccaucucacgccucgaacccgaagacuucgccgucuacuacugccaacaauacggaucaucccccuggaccuucggacaaggcaccaaagucgaaaucaaacgcaccgucgccgcccccuccgucuucaucuucccacccucagacgaacaacuaaaauccggcaccgccucaguagucugccuacuaaacaacuucuacccccgcgaagccaaaguccaauggaaagucgacaacgcccuccaauccggcaacucacaagaaucagucaccgaacaagacucaaaagacuccaccuacucccuauccuccacccucacccuaucaaaagccgacuacgaaaaacacaaaguauacgcgugcgaaguaacccaccagggccuauccucacccgucacaaaauccuucaaccgcggcgaaugcuga

SEQ ID NO: 702 - RNA, 648 nt, Artificial Sequence
  Ipilimumab LC without signale peptide
gaaaucguacuaacccaaucacccggcacccucucccucucccccggcgaacgagccacccuaucaugccgcgccucccaauccguaggcuccuccuaccuagccugguaccaacaaaaaccaggccaagcaccccgacuacucaucuacggagccuucucccgcgccaccggcauccccgaccgcuucuccggcuccggcuccggcaccgacuucacccucaccaucucccgccucgaacccgaagacuucgccgucuacuacugccaacaauacggaucaucccccuggaccuucggccaaggcaccaaagucgaaaucaaacgcaccgucgccgcccccuccgucuucauauucccacccuccgacgaacaacuaaaaucaggaaccgccuccgucgucugccuacuaaacaacuucuacccccgcgaagccaaaguacaauggaaagucgacaacgcccuccaauccggcaacucccaagaauccguaaccgaacaagacuccaaagacucaaccuauucccucuccuccacacucacacuauccaaagccgacuacgaaaaacacaaagucuacgccugcgaaguaacccaccaaggccucucaucacccgucaccaaauccuucaaccgcggcgaaugcuaa

SEQ ID NO: 703 - RNA, 648 nt, Artificial Sequence
  Ipilimumab LC without signale peptide
gaaaucguccucacccaaucccccggcacccuaucacucucacccggcgaacgcgcaacccucuccugccgagccucccaauccgucggcuccucauaccucgccugguaccaacaaaaacccggccaagcaccccgucuccucaucuacggcgccuucucacgcgccaccggcauccccgaccgcuucuccggcucuggcucaggcaccgacuucacccucaccaucucccgccucgaacccgaagacuucgccgucuacuacugccaacaauacggaucaucccccuggaccuucggccaaggcacaaaagucgaaaucaaacgcaccgucgccgccccauccgucuucaucuucccacccuccgacgaacaacucaaauccggcaccgccuccgucgucugccuccucaacaacuucuacccccgcgaagccaaaguccaauggaaagucgacaacgcccuccaauccggcaacucccaagaauccgucaccgaacaagacuccaaagacuccaccuacucacucuccuccacccuuacccucuccaaagccgacuacgaaaaacacaaagucuacgccugcgaagucacccaccaaggccucuccucccccgucaccaaauccuucaaccgcggcgaaugcuaa

SEQ ID NO: 704 - RNA, 648 nt, Artificial Sequence
  Ipilimumab LC without signale peptide
gaaauaguacuaacacaaucaccaggaacacuaucacucucaccuggagaaagagcaacauuauccugcagagcaucacaaucuguaggaucuucauaccuagcaugguaccaacaaaaaccaggacaagcaccaagauuacuaauauauggagcauuuuccagagcaacaggcauaccagacagauucucaggaucaggaucaggaaccgacuucacacuaacaauaucaagacuagaaccagaagacuucgcaguauacuacugccaacaauacggaucaucaccauggacauucggacaaggaacaaaaguagaaauaaaaagaacagucgcagcaccaucaguauucauauucccaccaucagacgaacaauuaaaauccggaacagcaucaguaguaugccuacuaaauaacuucuacccaagagaagcaaaaguacaauggaaaguagacaacgcauuacaaucaggaaacucccaagaaucaguaacagaacaagacucuaaagacucaacauacucccuaucaucaacacuaacacuaucaaaagcagacuaugaaaaacacaaaguauacgcaugcgaagucacacaucaaggacuaucaucaccaguaacaaaaucauuuaacagaggagaaugcuaa

SEQ ID NO: 705 - RNA, 648 nt, Artificial Sequence
  Ipilimumab LC without signale peptide
gaaauaguacuaacacaaucaccaggaacauuaucacuauccccaggagaaagagcaacauuaucaugcagagcaucacaaucaguaggaucaucauaccuagccugguaccaacaaaaaccaggacaagccccaagauuacuaauauacggagcauucucaagagcaacaggaauaccagacagauucucagguucuggcucaggcacagacuucacacucacaauaucaagacuagaaccagaagacuucgccguauacuacugccaacaauacggauccucaccauggacauucggacaaggaacaaaaguagaaauaaaacgaacaguagcagcaccaucaguauucauauucccaccaucagacgaacaauuaaaaucaggaacagcaucaguaguaugccuauuaaacaacuucuacccacgagaagccaaaguccaauggaaaguagauaacgcauuacaaucagguaacucacaagaaucaguaacagaacaagacuccaaagacucaacauacagccuaucaucaacacuaacauuaucaaaagcagacuaugaaaaacacaaaguauacgcaugcgagguaacacaccaaggacuaucaucaccaguaacaaaaucauucaauagaggagaaugcuaa

SEQ ID NO: 706 - protein, 215 aa, Artificial Sequence; identical to SEQ ID NO: 693
  Ipilimumab backbone Rituximab LC without signale peptide

SEQ ID NO: 707 - RNA, 648 nt, Artificial Sequence
  Ipilimumab backbone Rituximab LC without signale peptide
gagaucgugcugacccagagccccggcacccucucccugagcccgggggagcgcgccacgcuguccugccgggccagccaguccgucggcagcuccuaccucgcgugguaccagcagaagcccgggcaggcgccccgccugcugaucuacggcgccuucagccgggccaccgggauccccgaccgcuucuccggcagcggcuccgggaccgacuucacccucacgaucagccggcuggagccggaggacuucgccguguacuacugccagcaguacggcuccagccccuggaccuucgggcagggcaccaagguggagaucaagcgcaccguggcggcccccagcguguucaucuucccgcccagcgacgagcagcugaagagcgggaccgccucggucgugugccuccugaacaacuucuacccccgggaggccaaggugcaguggaaggucgacaacgcgcugcagagcggcaacagccaggagagcgugacggagcaggacagcaaggacagcaccuacucgcucagcagcacccugacccugagcaaggccgacuacgagaagcacaagguguacgccugcgaggucacgcaccaggggcucagcucgcccgugaccaagagcuucaaccgcggggagugcuga

SEQ ID NO: 708 - RNA, 648 nt, Artificial Sequence
  Ipilimumab backbone Rituximab LC without signale peptide
gagaucgugcugacccagagccccggcacacucucccuuucuccuggggaaagagccacucugucaugcagggcuagucaaagcgucggauccucuuacuuggcaugguaucagcagaagccaggucaggccccgcgguuacugauuuacggcgcguucucgcgcgcuacggggauacccgaccgauuuucaggaagcggcagugguaccgauuucacacuaacuaucucccgucucgagccugaagacuuugccguuuauuacugucaacaguaugggucuagcccauggaccuucggacagggcacaaaaguggagauuaagagaaccguggcggcccccagcguguucaucuucccgcccagcgacgagcagcugaagagcgggaccgccucggucgugugccuccugaacaacuucuacccccgggaggccaaggugcaguggaaggucgacaacgcgcugcagagcggcaacagccaggagagcgugacggagcaggacagcaaggacagcaccuacucgcucagcagcacccugacccugagcaaggccgacuacgagaagcacaagguguacgccugcgaggucacgcaccaggggcucagcucgcccgugaccaagagcuucaaccgcggugagugcuga

SEQ ID NO: 709 - RNA, 648 nt, Artificial Sequence
  Ipilimumab backbone Rituximab LC without signale peptide
gagaucgugcugacccagagccccggcacccugagccugagccccggcgagagagccacccugagcugcagagccagccagagcgugggcagcagcuaccuggccugguaccagcagaagcccggccaggcccccagacugcugaucuacggcgccuucagcagagccaccggcauccccgacagauucagcggcagcggcagcggcaccgacuucacccugaccaucagcagacuggagcccgaggacuucgccguguacuacugccagcaguacggcagcagccccuggaccuucggccagggcaccaagguggagaucaagagaaccguggcggcccccagcguguucaucuucccgcccagcgacgagcagcugaagagcgggaccgccucggucgugugccuccugaacaacuucuacccccgggaggccaaggugcaguggaaggucgacaacgcgcugcagagcggcaacagccaggagagcgugacggagcaggacagcaaggacagcaccuacucgcucagcagcacccugacccugagcaaggccgacuacgagaagcacaagguguacgccugcgaggucacgcaccaggggcucagcucgcccgugaccaagagcuucaaccgcggcgagugcuga

SEQ ID NO: 710 - RNA, 2791 nt, Artificial Sequence
  Ipilimumab opt1 IRES construct
auggagcugggccucagcuggaucuuccugcuggccauccucaagggggugcagugccaggugcagcuggucgagagcggcgggggcguggugcagcccgggcgcucccuccggcugagcugcgccgccuccggcuucaccuucagcuccuacaccaugcacuggguccgccaggcgccggggaagggccuggagugggugacguucaucagcuacgacggcaacaacaaguacuacgccgacuccgugaaggggcgguucaccaucagccgcgacaacuccaagaacacccucuaccugcagaugaacagccugcgggccgaggacaccgccaucuacuacugcgcccgcacgggcuggcucgggcccuucgacuacuggggccaggggacccuggucaccguguccagcgcguccaccaagggccccagcguguucccccuggccccguccagcaaguccacgagcggcgggaccgccgcccucggcugccuggucaaggacuacuuccccgagcccgugaccguguccuggaacagcggggcgcugaccagcggcguccacacguuccccgccgugcuccaguccagcggccuguacucccugagcuccguggucaccgugccgagcuccagccucgggacccagaccuacaucugcaacgugaaccacaagcccuccaacacgaaggucgacaagcggguggagcccaagagcugcgacaagacccacacgugcccgcccugccccgcccccgagcugcugggcgggcccuccguguuccucuucccgcccaagcccaaggacacccugaugaucagccgcacccccgaggugaccugcgucguggucgacgugucccacgaggacccggaggucaaguucaacugguacguggacggcguggagguccacaacgccaagaccaagccccgggaggagcaguacaacagcaccuaccgcgugguguccguccugacggugcuccaccaggacuggcugaacgggaaggaguacaagugcaaggugagcaacaaggcccugcccgcgcccaucgagaagaccaucuccaaggccaagggccagccgcgggagccccaggucuacacccucccgcccagccgcgacgagcugaccaagaaccaggugucccugacgugccucgugaagggcuucuaccccagcgacaucgccgucgagugggagagcaacgggcagcccgagaacaacuacaagaccacgcccccggugcuggacuccgacggcagcuucuuccuguacuccaagcucaccguggacaagagccgguggcagcaggggaacgucuucuccugcagcgugaugcacgaggcccugcacaaccacuacacccagaagucccugagccucucccccggcaagugaccaugcauuugaaagccgggggugggagauccggauugccagucugcucgauaucgcaggcuggguccgugacuacccacucccccuuuaauuccgccccucucccuccccccccccuaacguuacuggccgaagccgcuuggaauaaggccggugugcguuugucuauauguuauuuuccaccauauugccgucuuuuggcaaugugagggcccggaaaccuggcccugucuucuugacgagcauuccuaggggucuuuccccucucgccaaaggaaugcaaggucuguugaaugucgugaaggaagcaguuccucuggaagcuucuugaagacaaacaacgucuguagcgacccuuugcaggcagcggaaccccccaccuggcgacaggugccucugcggccaaaagccacguguauaagauacaccugcaaaggcggcacaaccccagugccacguugugaguuggauaguuguggaaagagucaaauggcucuccucaagcguauucaacaaggggcugaaggaugcccagaagguaccccauuguaugggaucugaucuggggccucggugcacaugcuuuacguguguuuagucgagguuaaaaaacgucuaggccccccgaaccacggggacgugguuuuccuuugaaaaacacgaugauaauagaucuaccauggagacccccgcccagcugcucuuccugcugcuccuguggcugccggacaccacgggcgagaucgugcugacccagagccccggcacccucucccugagcccgggggagcgcgccacgcuguccugccgggccagccaguccgucggcagcuccuaccucgcgugguaccagcagaagcccgggcaggcgccccgccugcugaucuacggcgccuucagccgggccaccgggauccccgaccgcuucuccggcagcggcuccgggaccgacuucacccucacgaucagccggcuggagccggaggacuucgccguguacuacugccagcaguacggcuccagccccuggaccuucgggcagggcaccaagguggagaucaagcgcaccgucgccgcccccuccguguucaucuucccgcccagcgacgagcagcugaaguccgggacggccagcguggucugccuccugaacaacuucuacccccgggaggccaaggugcaguggaagguggacaacgcgcugcaguccggcaacagccaggagagcgucaccgagcaggacuccaaggacagcaccuacucccucagcuccacccugacgcugagcaaggccgacuacgagaagcacaagguguacgccugcgaggugacccaccagggccucuccagccccgucaccaaguccuucaaccgcggggagugcuga

SEQ ID NO: 711 - RNA, 2791 nt, Artificial Sequence
  Ipilimumab opt3 IRES construct
auggagcugggccucagcuggaucuuccuucuggccauuuugaagggggugcagugccaaguccaguuaguugaauccggagguggcgugguacagcccgggagaucucugaggcuaucaugugcugcaaguggauuuaccuucagcuccuacacaaugcacugggugcggcaggccccuggcaaaggucucgagugggucacuuuuauaucuuaugacgggaacaauaaguacuaugcggauucggugaaaggacgcuucacgaucucacgagacaacagcaagaauacccuguaccuucaaaugaacagucugcgugcugaagauacagccauuuauuacugcgcaagaacuggcugguugggcccauuugacuauugggggcagggaacccucguuacaguguccucugccagcaccaaagguccguccgucuucccccuggcuccuucaaguaagagcacuucuggcgggacagcagcccugggaugucucgugaaggauuacuuuccagagcccguaaccguuuccuggaacucaggcgcuuuaacgagcggugugcauacuuucccugccguccugcagaguucugggcuuuacuccuugagcucgguggugaccgucccaucuuccucacugggaacacagacuuauaucugcaauguuaaucacaaacccaguaacaccaagguggacaaaaggguagaaccuaagagcugugauaaaacacauaccugcccaccgugucccgcgccugagcuacucggcggcccauccguguuucuguuucccccuaagccaaaggacacgcuuaugauuucucggacucccgaggucacaugcgugguuguggaugucagccacgaagacccggaggugaaauuuaauugguacguagaugggguugaagugcauaacgcaaagaccaaaccucgcgaggagcaauauaauucaacuuacagagucgugaguguccugacaguguugcaccaggacuggcucaacggaaaggaauauaaauguaagguuuccaauaaagcccugcccgcuccaaucgagaagaccauaagcaaggccaaaggucagccuagggaaccccagguguacacguuaccacccucucgggaugagcugaccaagaaccaaguaucacucacaugccuugucaaaggcuucuauccuagugacaucgcaguggaaugggagagcaaugggcagccagagaacaacuacaagacuaccccgcccguucuggacuccgauggaucuuucuucuuguacucgaaacuaacaguggacaagagccgcuggcagcaaggcaaugucuucuccuguucagugaugcacgaagcucugcauaaccacuauacucagaagagucucucucugagcccugguaaaugaccaugcauuugaaagccgggggugggagauccggauugccagucugcucgauaucgcaggcuggguccgugacuacccacucccccuuuaauuccgccccucucccuccccccccccuaacguuacuggccgaagccgcuuggaauaaggccggugugcguuugucuauauguuauuuuccaccauauugccgucuuuuggcaaugugagggcccggaaaccuggcccugucuucuugacgagcauuccuaggggucuuuccccucucgccaaaggaaugcaaggucuguugaaugucgugaaggaagcaguuccucuggaagcuucuugaagacaaacaacgucuguagcgacccuuugcaggcagcggaaccccccaccuggcgacaggugccucugcggccaaaagccacguguauaagauacaccugcaaaggcggcacaaccccagugccacguugugaguuggauaguuguggaaagagucaaauggcucuccucaagcguauucaacaaggggcugaaggaugcccagaagguaccccauuguaugggaucugaucuggggccucggugcacaugcuuuacguguguuuagucgagguuaaaaaacgucuaggccccccgaaccacggggacgugguuuuccuuugaaaaacacgaugauaauagaucuaccauggagacccccgcccagcuucucuuccuucuguuguuauggcugccugacacaacuggcgaaaucgugcuaacgcaaagcccagggacccucucccugucuccgggagagagagcuacacuuucaugcagggcaagucagagcgucgguuccucuuaccuggccugguaucagcagaagcccggccaagcgccucgguugcucauuuacggggcuuuuucgcgcgccacuggaauaccagaucgauucucaggcagcgguagugggaccgacuuuacacugaccaucucccgucuggaacccgaggauuucgcaguuuauuacugucagcaguauggaucuagcccuuggacuuuuggccagggcacaaaaguggaaauuaagagaaccguagccgcuccauccguguucaucuuucccccuucagacgagcaacucaaaagugggacggcaagcgucgugugcuuacugaacaauuucuacccaagggaggccaagguucaguggaaaguggauaacgcucugcagucuggaaauucccaggaaucagucacugagcaagacagcaaggauaguaccuauucuuuguccagcacacugacucuaucgaaggccgacuacgaaaaacacaagguguacgcgugugagguaacccaucagggucucucuuccccgguuacaaaaucauuuaaccggggcgagugcuga

SEQ ID NO: 712 - RNA, 2791 nt, Artificial Sequence
  Ipilimumab opt4 IRES construct
auggagcugggccugagcuggaucuuccugcuggccauccugaagggcgugcagugccaggugcagcugguggagagcggcggcggcguggugcagcccggcagaagccugagacugagcugcgccgccagcggcuucaccuucagcagcuacaccaugcacugggugagacaggcccccggcaagggccuggagugggugaccuucaucagcuacgacggcaacaacaaguacuacgccgacagcgugaagggcagauucaccaucagcagagacaacagcaagaacacccuguaccugcagaugaacagccugagagccgaggacaccgccaucuacuacugcgccagaaccggcuggcugggccccuucgacuacuggggccagggcacccuggugaccgugagcagcgccagcaccaagggccccagcguguucccccuggcccccagcagcaagagcaccagcggcggcaccgccgcccugggcugccuggugaaggacuacuuccccgagcccgugaccgugagcuggaacagcggcgcccugaccagcggcgugcacaccuuccccgccgugcugcagagcagcggccuguacagccugagcagcguggugaccgugcccagcagcagccugggcacccagaccuacaucugcaacgugaaccacaagcccagcaacaccaagguggacaagagaguggagcccaagagcugcgacaagacccacaccugcccccccugccccgcccccgagcugcugggcggccccagcguguuccuguucccccccaagcccaaggacacccugaugaucagcagaacccccgaggugaccugcguggugguggacgugagccacgaggaccccgaggugaaguucaacugguacguggacggcguggaggugcacaacgccaagaccaagcccagagaggagcaguacaacagcaccuacagaguggugagcgugcugaccgugcugcaccaggacuggcugaacggcaaggaguacaagugcaaggugagcaacaaggcccugcccgcccccaucgagaagaccaucagcaaggccaagggccagcccagagagccccagguguacacccugccccccagcagagacgagcugaccaagaaccaggugagccugaccugccuggugaagggcuucuaccccagcgacaucgccguggagugggagagcaacggccagcccgagaacaacuacaagaccaccccccccgugcuggacagcgacggcagcuucuuccuguacagcaagcugaccguggacaagagcagauggcagcagggcaacguguucagcugcagcgugaugcacgaggcccugcacaaccacuacacccagaagagccugagccugagccccggcaagugaccaugcauuugaaagccgggggugggagauccggauugccagucugcucgauaucgcaggcuggguccgugacuacccacucccccuuuaauuccgccccucucccuccccccccccuaacguuacuggccgaagccgcuuggaauaaggccggugugcguuugucuauauguuauuuuccaccauauugccgucuuuuggcaaugugagggcccggaaaccuggcccugucuucuugacgagcauuccuaggggucuuuccccucucgccaaaggaaugcaaggucuguugaaugucgugaaggaagcaguuccucuggaagcuucuugaagacaaacaacgucuguagcgacccuuugcaggcagcggaaccccccaccuggcgacaggugccucugcggccaaaagccacguguauaagauacaccugcaaaggcggcacaaccccagugccacguugugaguuggauaguuguggaaagagucaaauggcucuccucaagcguauucaacaaggggcugaaggaugcccagaagguaccccauuguaugggaucugaucuggggccucggugcacaugcuuuacguguguuuagucgagguuaaaaaacgucuaggccccccgaaccacggggacgugguuuuccuuugaaaaacacgaugauaauagaucuaccauggagacccccgcccagcugcuguuccugcugcugcuguggcugcccgacaccaccggcgagaucgugcugacccagagccccggcacccugagccugagccccggcgagagagccacccugagcugcagagccagccagagcgugggcagcagcuaccuggccugguaccagcagaagcccggccaggcccccagacugcugaucuacggcgccuucagcagagccaccggcauccccgacagauucagcggcagcggcagcggcaccgacuucacccugaccaucagcagacuggagcccgaggacuucgccguguacuacugccagcaguacggcagcagccccuggaccuucggccagggcaccaagguggagaucaagagaaccguggccgcccccagcguguucaucuucccccccagcgacgagcagcugaagagcggcaccgccagcguggugugccugcugaacaacuucuaccccagagaggccaaggugcaguggaagguggacaacgcccugcagagcggcaacagccaggagagcgugaccgagcaggacagcaaggacagcaccuacagccugagcagcacccugacccugagcaaggccgacuacgagaagcacaagguguacgccugcgaggugacccaccagggccugagcagccccgugaccaagagcuucaacagaggcgagugcuga

SEQ ID NO: 713 - RNA, 2175 nt, Artificial Sequence
  Ipilimumab opt1 F2A construct
auggagcugggccucagcuggaucuuccugcuggccauccucaagggggugcagugccaggugcagcuggucgagagcggcgggggcguggugcagcccgggcgcucccuccggcugagcugcgccgccuccggcuucaccuucagcuccuacaccaugcacuggguccgccaggcgccggggaagggccuggagugggugacguucaucagcuacgacggcaacaacaaguacuacgccgacuccgugaaggggcgguucaccaucagccgcgacaacuccaagaacacccucuaccugcagaugaacagccugcgggccgaggacaccgccaucuacuacugcgcccgcacgggcuggcucgggcccuucgacuacuggggccaggggacccuggucaccguguccagcgcguccaccaagggccccagcguguucccccuggccccguccagcaaguccacgagcggcgggaccgccgcccucggcugccuggucaaggacuacuuccccgagcccgugaccguguccuggaacagcggggcgcugaccagcggcguccacacguuccccgccgugcuccaguccagcggccuguacucccugagcuccguggucaccgugccgagcuccagccucgggacccagaccuacaucugcaacgugaaccacaagcccuccaacacgaaggucgacaagcggguggagcccaagagcugcgacaagacccacacgugcccgcccugccccgcccccgagcugcugggcgggcccuccguguuccucuucccgcccaagcccaaggacacccugaugaucagccgcacccccgaggugaccugcgucguggucgacgugucccacgaggacccggaggucaaguucaacugguacguggacggcguggagguccacaacgccaagaccaagccccgggaggagcaguacaacagcaccuaccgcgugguguccguccugacggugcuccaccaggacuggcugaacgggaaggaguacaagugcaaggugagcaacaaggcccugcccgcgcccaucgagaagaccaucuccaaggccaagggccagccgcgggagccccaggucuacacccucccgcccagccgcgacgagcugaccaagaaccaggugucccugacgugccucgugaagggcuucuaccccagcgacaucgccgucgagugggagagcaacgggcagcccgagaacaacuacaagaccacgcccccggugcuggacuccgacggcagcuucuuccuguacuccaagcucaccguggacaagagccgguggcagcaggggaacgucuucuccugcagcgugaugcacgaggcccugcacaaccacuacacccagaagucccugagccucucccccggcaaggugaagcagacacucaauuucgaccuucugaaguuggcuggagauguugagucuaacccaggccccauggagacccccgcccagcugcucuuccugcugcuccuguggcugccggacaccacgggcgagaucgugcugacccagagccccggcacccucucccugagcccgggggagcgcgccacgcuguccugccgggccagccaguccgucggcagcuccuaccucgcgugguaccagcagaagcccgggcaggcgccccgccugcugaucuacggcgccuucagccgggccaccgggauccccgaccgcuucuccggcagcggcuccgggaccgacuucacccucacgaucagccggcuggagccggaggacuucgccguguacuacugccagcaguacggcuccagccccuggaccuucgggcagggcaccaagguggagaucaagcgcaccgucgccgcccccuccguguucaucuucccgcccagcgacgagcagcugaaguccgggacggccagcguggucugccuccugaacaacuucuacccccgggaggccaaggugcaguggaagguggacaacgcgcugcaguccggcaacagccaggagagcgucaccgagcaggacuccaaggacagcaccuacucccucagcuccacccugacgcugagcaaggccgacuacgagaagcacaagguguacgccugcgaggugacccaccagggccucuccagccccgucaccaaguccuucaaccgcggggagugcuga

SEQ ID NO: 714 - RNA, 2175 nt, Artificial Sequence
  Ipilimumab opt3 F2A construct
auggagcugggccucagcuggaucuuccuucuggccauuuugaagggggugcagugccaaguccaguuaguugaauccggagguggcgugguacagcccgggagaucucugaggcuaucaugugcugcaaguggauuuaccuucagcuccuacacaaugcacugggugcggcaggccccuggcaaaggucucgagugggucacuuuuauaucuuaugacgggaacaauaaguacuaugcggauucggugaaaggacgcuucacgaucucacgagacaacagcaagaauacccuguaccuucaaaugaacagucugcgugcugaagauacagccauuuauuacugcgcaagaacuggcugguugggcccauuugacuauugggggcagggaacccucguuacaguguccucugccagcaccaaagguccguccgucuucccccuggcuccuucaaguaagagcacuucuggcgggacagcagcccugggaugucucgugaaggauuacuuuccagagcccguaaccguuuccuggaacucaggcgcuuuaacgagcggugugcauacuuucccugccguccugcagaguucugggcuuuacuccuugagcucgguggugaccgucccaucuuccucacugggaacacagacuuauaucugcaauguuaaucacaaacccaguaacaccaagguggacaaaaggguagaaccuaagagcugugauaaaacacauaccugcccaccgugucccgcgccugagcuacucggcggcccauccguguuucuguuucccccuaagccaaaggacacgcuuaugauuucucggacucccgaggucacaugcgugguuguggaugucagccacgaagacccggaggugaaauuuaauugguacguagaugggguugaagugcauaacgcaaagaccaaaccucgcgaggagcaauauaauucaacuuacagagucgugaguguccugacaguguugcaccaggacuggcucaacggaaaggaauauaaauguaagguuuccaauaaagcccugcccgcuccaaucgagaagaccauaagcaaggccaaaggucagccuagggaaccccagguguacacguuaccacccucucgggaugagcugaccaagaaccaaguaucacucacaugccuugucaaaggcuucuauccuagugacaucgcaguggaaugggagagcaaugggcagccagagaacaacuacaagacuaccccgcccguucuggacuccgauggaucuuucuucuuguacucgaaacuaacaguggacaagagccgcuggcagcaaggcaaugucuucuccuguucagugaugcacgaagcucugcauaaccacuauacucagaagagucucucucugagcccugguaaagugaagcagacacucaauuucgaccuucugaaguuggcuggagauguugagucuaacccaggccccauggagacccccgcccagcuucucuuccuucuguuguuauggcugccugacacaacuggcgaaaucgugcuaacgcaaagcccagggacccucucccugucuccgggagagagagcuacacuuucaugcagggcaagucagagcgucgguuccucuuaccuggccugguaucagcagaagcccggccaagcgccucgguugcucauuuacggggcuuuuucgcgcgccacuggaauaccagaucgauucucaggcagcgguagugggaccgacuuuacacugaccaucucccgucuggaacccgaggauuucgcaguuuauuacugucagcaguauggaucuagcccuuggacuuuuggccagggcacaaaaguggaaauuaagagaaccguagccgcuccauccguguucaucuuucccccuucagacgagcaacucaaaagugggacggcaagcgucgugugcuuacugaacaauuucuacccaagggaggccaagguucaguggaaaguggauaacgcucugcagucuggaaauucccaggaaucagucacugagcaagacagcaaggauaguaccuauucuuuguccagcacacugacucuaucgaaggccgacuacgaaaaacacaagguguacgcgugugagguaacccaucagggucucucuuccccgguuacaaaaucauuuaaccggggcgagugcuga

SEQ ID NO: 715 - RNA, 2175 nt, Artificial Sequence
  Ipilimumab opt4 F2A construct
auggagcugggccugagcuggaucuuccugcuggccauccugaagggcgugcagugccaggugcagcugguggagagcggcggcggcguggugcagcccggcagaagccugagacugagcugcgccgccagcggcuucaccuucagcagcuacaccaugcacugggugagacaggcccccggcaagggccuggagugggugaccuucaucagcuacgacggcaacaacaaguacuacgccgacagcgugaagggcagauucaccaucagcagagacaacagcaagaacacccuguaccugcagaugaacagccugagagccgaggacaccgccaucuacuacugcgccagaaccggcuggcugggccccuucgacuacuggggccagggcacccuggugaccgugagcagcgccagcaccaagggccccagcguguucccccuggcccccagcagcaagagcaccagcggcggcaccgccgcccugggcugccuggugaaggacuacuuccccgagcccgugaccgugagcuggaacagcggcgcccugaccagcggcgugcacaccuuccccgccgugcugcagagcagcggccuguacagccugagcagcguggugaccgugcccagcagcagccugggcacccagaccuacaucugcaacgugaaccacaagcccagcaacaccaagguggacaagagaguggagcccaagagcugcgacaagacccacaccugcccccccugccccgcccccgagcugcugggcggccccagcguguuccuguucccccccaagcccaaggacacccugaugaucagcagaacccccgaggugaccugcguggugguggacgugagccacgaggaccccgaggugaaguucaacugguacguggacggcguggaggugcacaacgccaagaccaagcccagagaggagcaguacaacagcaccuacagaguggugagcgugcugaccgugcugcaccaggacuggcugaacggcaaggaguacaagugcaaggugagcaacaaggcccugcccgcccccaucgagaagaccaucagcaaggccaagggccagcccagagagccccagguguacacccugccccccagcagagacgagcugaccaagaaccaggugagccugaccugccuggugaagggcuucuaccccagcgacaucgccguggagugggagagcaacggccagcccgagaacaacuacaagaccaccccccccgugcuggacagcgacggcagcuucuuccuguacagcaagcugaccguggacaagagcagauggcagcagggcaacguguucagcugcagcgugaugcacgaggcccugcacaaccacuacacccagaagagccugagccugagccccggcaaggugaagcagacacucaauuucgaccuucugaaguuggcuggagauguugagucuaacccaggccccauggagacccccgcccagcugcuguuccugcugcugcuguggcugcccgacaccaccggcgagaucgugcugacccagagccccggcacccugagccugagccccggcgagagagccacccugagcugcagagccagccagagcgugggcagcagcuaccuggccugguaccagcagaagcccggccaggcccccagacugcugaucuacggcgccuucagcagagccaccggcauccccgacagauucagcggcagcggcagcggcaccgacuucacccugaccaucagcagacuggagcccgaggacuucgccguguacuacugccagcaguacggcagcagccccuggaccuucggccagggcaccaagguggagaucaagagaaccguggccgcccccagcguguucaucuucccccccagcgacgagcagcugaagagcggcaccgccagcguggugugccugcugaacaacuucuaccccagagaggccaaggugcaguggaagguggacaacgcccugcagagcggcaacagccaggagagcgugaccgagcaggacagcaaggacagcaccuacagccugagcagcacccugacccugagcaaggccgacuacgagaagcacaagguguacgccugcgaggugacccaccagggccugagcagccccgugaccaagagcuucaacagaggcgagugcuga

SEQ ID NO: 716 - RNA, 987 nt, Artificial Sequence
  IL12B
augugccaccagcagcuggugaucagcugguucagccugguguuccuggccagcccccugguggccaucugggagcugaagaaggacguguacgugguggagcuggacugguaccccgacgcccccggcgagaugguggugcugaccugcgacacccccgaggaggacggcaucaccuggacccuggaccagagcagcgaggugcugggcagcggcaagacccugaccauccaggugaaggaguucggcgacgccggccaguacaccugccacaagggcggcgaggugcugagccacagccugcugcugcugcacaagaaggaggacggcaucuggagcaccgacauccugaaggaccagaaggagcccaagaacaagaccuuccugagaugcgaggccaagaacuacagcggcagauucaccugcugguggcugaccaccaucagcaccgaccugaccuucagcgugaagagcagcagaggcagcagcgacccccagggcgugaccugcggcgccgccacccugagcgccgagagagugagaggcgacaacaaggaguacgaguacagcguggagugccaggaggacagcgccugccccgccgccgaggagagccugcccaucgaggugaugguggacgccgugcacaagcugaaguacgagaacuacaccagcagcuucuucaucagagacaucaucaagcccgacccccccaagaaccugcagcugaagccccugaagaacagcagacagguggaggugagcugggaguaccccgacaccuggagcaccccccacagcuacuucagccugaccuucugcgugcaggugcagggcaagagcaagagagagaagaaggacagaguguucaccgacaagaccagcgccaccgugaucugcagaaagaacgccagcaucagcgugagagcccaggacagauacuacagcagcagcuggagcgagugggccagcgugcccugcagcuag

SEQ ID NO: 717 - RNA, 987 nt, Artificial Sequence
  IL12B
augugccaccagcagcuggugaucuccugguucagccugguguuccuggccagcccccugguggccaucugggagcugaagaaggauguguaugugguggagcuggacugguacccagaugccccuggagagaugguggugcugaccugugacaccccagaagaagauggcaucaccuggacccuggaccagagcagcgaggugcugggcagcggcaagacccugaccauccaggugaaggaguuuggagaugcuggccaguacaccugccacaagggcggggaggugcugagccacagccugcugcugcugcacaagaaggaggauggcaucuggagcacagacauccugaaggaccagaaggagcccaagaacaagaccuuccugcgcugugaggccaagaacuacagcggccgcuucaccugcugguggcugaccaccaucagcacagaccugaccuucucugugaagagcagccggggcagcagugacccccagggcgugaccuguggggccgccacccugucugcugagcgggugcggggggacaacaaggaguaugaguacagcguggagugccaggaggacagcgccugcccagcugcugaggagagccugcccaucgaggugaugguggaugcugugcacaagcugaaguaugagaacuacaccagcagcuucuucauccgggacaucaucaagccagacccccccaagaaccugcagcugaagccccugaagaacagccggcagguggagguguccugggaguacccagacaccuggagcaccccccacagcuacuucagccugaccuucugugugcaggugcagggcaagagcaagcgggagaagaaggacagagucuucacagacaagaccagcgccaccgucaucugcaggaagaaugccagcaucucugugcgggcccaggaccgcuacuacagcagcuccuggagcgagugggccucugugcccugcagcuag

SEQ ID NO: 718 - RNA, 720 nt, Artificial Sequence
  IL12A
auguggcccccaggcagcgccagccagcccccacccagcccugcugcugccaccggccugcacccugcugcccggccugugucccugcagugccgccuguccaugugcccagcccggagccugcugcugguggccacccuggugcugcuggaccaccugagccuggccaggaaccugccuguggccaccccagaccccggcauguuccccugccugcaccacagccagaaccugcugcgggcugugagcaacaugcugcagaaggcccggcagacccuggaguucuaccccugcaccagcgaggagauugaccacgaggacaucaccaaggacaagaccagcacaguggaggccugccugccccuggagcugaccaagaauggcagcugccuggccagcaggaagaccagcuucaugauggcccugugccugagcagcaucuaugaggaccugaagauguaccagguggaguucaagaccaugaaugccaagcugcugauggaccccaagaggcagaucuuccuggaccagaacaugcuggccgugauugaugagcugaugcaggcccugaacuucaacagcgagaccgugccccagaagagcagccuggaggagccagacuucuacaagaccaagaucaagcugugcauccugcugcacgccuuccgcauccgggcugugaccaucgacagagugaugagcuaccugaaugccagcuag

SEQ ID NO: 719 - RNA, 720 nt, Artificial Sequence; identical to SEQ ID NO: 718
  IL12A

SEQ ID NO: 720 - RNA, 720 nt, Artificial Sequence
  IL12A
auguggccccccggcagcgccagccagcccccccccagccccgccgccgccaccggccugcaccccgccgccagacccgugagccugcagugcagacugagcaugugccccgccagaagccugcugcugguggccacccuggugcugcuggaccaccugagccuggccagaaaccugcccguggccacccccgaccccggcauguuccccugccugcaccacagccagaaccugcugagagccgugagcaacaugcugcagaaggccagacagacccuggaguucuaccccugcaccagcgaggagaucgaccacgaggacaucaccaaggacaagaccagcaccguggaggccugccugccccuggagcugaccaagaacggcagcugccuggccagcagaaagaccagcuucaugauggcccugugccugagcagcaucuacgaggaccugaagauguaccagguggaguucaagaccaugaacgccaagcugcugauggaccccaagagacagaucuuccuggaccagaacaugcuggccgugaucgacgagcugaugcaggcccugaacuucaacagcgagaccgugccccagaagagcagccuggaggagcccgacuucuacaagaccaagaucaagcugugcauccugcugcacgccuucagaaucagagccgugaccaucgacagagugaugagcuaccugaacgccagcuag

SEQ ID NO: 721 - RNA, 720 nt, Artificial Sequence; identical to SEQ ID NO: 720
  IL12A

SEQ ID NO: 722 - RNA, 762 nt, Artificial Sequence
  IL12A
auguggcccccaggcagcgccagccagcccccacccagcccugcugcugccaccggccugcacccugcugcccggccugugucccugcagugccgccuguccaugugcccagcccggagccugcugcugguggccacccuggugcugcuggaccaccugagccuggccaggaaccugccuguggccaccccagaccccggcauguuccccugccugcaccacagccagaaccugcugcgggcugugagcaacaugcugcagaaggcccggcagacccuggaguucuaccccugcaccagcgaggagauugaccacgaggacaucaccaaggacaagaccagcacaguggaggccugccugccccuggagcugaccaagaaugaaagcugccugaacagccgggagaccagcuucaucaccaacggcagcugccuggccagcaggaagaccagcuucaugauggcccugugccugagcagcaucuaugaggaccugaagauguaccagguggaguucaagaccaugaaugccaagcugcugauggaccccaagaggcagaucuuccuggaccagaacaugcuggccgugauugaugagcugaugcaggcccugaacuucaacagcgagaccgugccccagaagagcagccuggaggagccagacuucuacaagaccaagaucaagcugugcauccugcugcacgccuuccgcauccgggcugugaccaucgacagagugaugagcuaccugaaugccagcuag

SEQ ID NO: 723 - RNA, 762 nt, Artificial Sequence; identical to SEQ ID NO: 722
  IL12A

SEQ ID NO: 724 - RNA, 762 nt, Artificial Sequence
  IL12A
auguggccccccggcagcgccagccagcccccccccagccccgccgccgccaccggccugcaccccgccgccagacccgugagccugcagugcagacugagcaugugccccgccagaagccugcugcugguggccacccuggugcugcuggaccaccugagccuggccagaaaccugcccguggccacccccgaccccggcauguuccccugccugcaccacagccagaaccugcugagagccgugagcaacaugcugcagaaggccagacagacccuggaguucuaccccugcaccagcgaggagaucgaccacgaggacaucaccaaggacaagaccagcaccguggaggccugccugccccuggagcugaccaagaacgagagcugccugaacagcagagagaccagcuucaucaccaacggcagcugccuggccagcagaaagaccagcuucaugauggcccugugccugagcagcaucuacgaggaccugaagauguaccagguggaguucaagaccaugaacgccaagcugcugauggaccccaagagacagaucuuccuggaccagaacaugcuggccgugaucgacgagcugaugcaggcccugaacuucaacagcgagaccgugccccagaagagcagccuggaggagcccgacuucuacaagaccaagaucaagcugugcauccugcugcacgccuucagaaucagagccgugaccaucgacagagugaugagcuaccugaacgccagcuag

SEQ ID NO: 725 - RNA, 762 nt, Artificial Sequence; identical to SEQ ID NO: 724
  IL12A

SEQ ID NO: 726 - RNA, 2761 nt, Artificial Sequence
  IL12 construct
gggcauacaguuguuccaucccgacaugaacucagccucccgucugaccgccccuuggccuuccuucuuccucgaucuguggaacccagggaaucugccuagugcugucuccaagcaccuuggccaugauguaaacccagagaaauuagcaucuccaucuccuuccuuauuccccacccaaaagucauuuccucuuaguucauuaccugggauuuugaugucuauguucccuccucguuauugauacacacacagagagagacaaacaaaaaaggaacuucuugaaauucccccagaagguuuugagaguuguuuucaauguugcaacaagucaguuucuaguuuaaguuuccaucagaaaggaguagaguauauaaguuccaguaccagcaacagcagcagaagaaacaacaucuguuucagggccauuggacucuccguccugcccagagcaagaugugucaccagcaguuggucaucucuugguuuucccugguuuuucuggcaucuccccucguggccauaugggaacugaagaaagauguuuaugucguagaauuggauugguauccggaugccccuggagaaauggugguccucaccugugacaccccugaagaagaugguaucaccuggaccuuggaccagagcagugaggucuuaggcucuggcaaaacccugaccauccaagucaaagaguuuggagaugcuggccaguacaccugucacaaaggaggcgagguucuaagccauucgcuccugcugcuucacaaaaaggaagauggaauuugguccacugauauuuuaaaggaccagaaagaacccaaaaauaagaccuuucuaagaugcgaggccaagaauuauucuggacguuucaccugcugguggcugacgacaaucaguacugauuugacauucagugucaaaagcagcagaggcucuucugacccccaaggggugacgugcggagcugcuacacucucugcagagagagucagaggggacaacaaggaguaugaguacucaguggagugccaggaggacagugccugcccagcugcugaggagagucugcccauugaggucaugguggaugccguucacaagcucaaguaugaaaacuacaccagcagcuucuucaucagggacaucaucaaaccugacccacccaagaacuugcagcugaagccauuaaagaauucucggcagguggaggucagcugggaguacccugacaccuggaguacuccacauuccuacuucucccugacauucugcguucagguccagggcaagagcaagagagaaaagaaagauagagucuucacggacaagaccucagccacggucaucugccgcaaaaaugccagcauuagcgugcgggcccaggaccgcuacuauagcucaucuuggagcgaaugggcaucugugcccugcaguuagguucugauccaggaugaaaauuuggaggaaaaguggaagauauuaagcaaaauguuuaaagacacaacggaauagacccaaaaagauaauuucuaucugauuugcuuuaaaacguuuuuuuaggaucacaaugauaucuuugcuguauuuguauaguuagaugcuaaaugcucauugaaacaaucagcuaauuuauguauagauuuuccagcucucaaguugccaugggccuucaugcuauuuaaauauuuaaguaauuuauguauuuauuaguauauuacuguuauuuaacguuugucugccaggauguauggaauguuucauacucuuaugaccugauccaucaggaucagucccuauuaugcaaaaugugaauuuaauuuuauuuguacugacaacuuuucaagcaaggcugcaaguacaucaguuuuaugacaaucaggaagaaugcaguguucugauaccagugccaucauacacuugugauggaugggaacgcaagagauacuuacauggaaaccugacaaugcaaaccuguugagaagauccaggagaacaagaugcuaguucccaugucugugaagacuuccuggagaugguguugauaaagcaauuuagggccacuuacacuucuaagcaaguuuaaucuuuggaugccugaauuuuaaaagggcuagaaaaaaaugauugaccagccugggaaacauaacaagaccccgucucuacaaaaaaaauuuaaaauuagccaggcgugguggcucaugcuuguggucccagcuguucaggaggaugaggcaggaggaucucuugagcccaggaggucaaggcuauggugagccgugauugugccacugcauaccagccuaggugacagaaugagacccugucucaaaaaaaaaaaugauugaaauuaaaauucagcuuuagcuuccauggcaguccucacccccaccucucuaaaagacacaggaggaugacacagaaacaccguaagugucuggaaggcaaaaagaucuuaagauucaagagagaggacaaguaguuauggcuaaggacaugaaauugucagaauggcagguggcuucuuaacagcccugugagaagcagacagaugcaaagaaaaucuggaaucccuuucucauuagcaugaaugaaccugauacacaauuaugaccagaaaauauggcuccaugaaggugcuacuuuuaaguaauguaugugcgcucuguaaagugauuacauuuguuuccuguuuguuuauuuauuuauuuauuuuugcauucugaggcugaacuaauaaaaacucuucuuuguaauc

SEQ ID NO: 727 - RNA, 591 nt, Artificial Sequence
  IL12A
auguguccagcgcgcagccuccuccuuguggcuacccugguccuccuggaccaccucaguuuggccagaaaccuccccguggccacuccagacccaggaauguucccaugccuucaccacucccaaaaccugcugagggccgucagcaacaugcuccagaagaaugagaguugccuaaauuccagagagaccucuuucauaacuaaugggaguugccuggccuccagaaagaccucuuuuaugauggcccugugccuuaguaguauuuaugaagacuugaagauguaccagguggaguucaagaccaugaaugcaaagcuucugauggauccuaagaggcagaucuuucuagaucaaaacaugcuggcaguuauugaugagcugaugcaggcccugaauuucaacagugagacugugccacaaaaauccucccuugaagaaccggauuuuuauaaaacuaaaaucaagcucugcauacuucuucaugcuuucagaauucgggcagugacuauugauagagugaugagcuaucugaaugcuuccuaaaaagcgaggucccuccaaaccguugucauuuuuauaaaacuuuga

SEQ ID NO: 728 - RNA, 786 nt, Artificial Sequence
  CD40LG
augaucgagacauauaaccagaccuccccaagauccgcagcuaccgggcugccuaucagcaugaaaaucuuuauguacuuguuaacgguguuuuugaucacgcagaugaucggaagcgcccucuuugcaguguaucugcauagaaggcuugacaaaauugaagaugagagaaaucugcacgaagacuucguguuuaugaaaaccauccaacgguguaacaccggggagcggucucuuagccugcugaauugcgaagagauuaagagccaauuugaggguuuugugaaagacaucaugcugaacaaagaggaaaccaagaaagaaaacucuuucgagaugcagaaaggugaccagaacccucagaucgccgcccacgugaucucugaggccaguuccaagacuacaucugugcuccaaugggccgaaaaaggcuacuacacuauguccaauaacuuggugacccuagagaacggaaagcaacugaccgugaaacggcagggacuguacuacauuuacgcccaggugacguucugcuccaaccgcgaagccaguucucaggcuccuuuuaucgccagucuuugccucaaaagccccgggcgauucgaaagaauccuguugagggcagcaaacacacacucauccgcuaaaccuugcgggcagcaaucgauccaucuuggcggagucuuugaacugcagcccggcgccucuguauucgugaacgucacggacccaagccaggugagccauggaacaggguuuacaucauuuggacugcuaaagcuguag

SEQ ID NO: 729 - RNA, 786 nt, Artificial Sequence
  CD40LG
augaucgagaccuacaaccagaccagccccagaagcgccgccaccggccugcccaucagcaugaagaucuucauguaccugcugaccguguuccugaucacccagaugaucggcagcgcccuguucgccguguaccugcacagaagacuggacaagaucgaggacgagagaaaccugcacgaggacuucguguucaugaagaccauccagagaugcaacaccggcgagagaagccugagccugcugaacugcgaggagaucaagagccaguucgagggcuucgugaaggacaucaugcugaacaaggaggagaccaagaaggagaacagcuucgagaugcagaagggcgaccagaacccccagaucgccgcccacgugaucagcgaggccagcagcaagaccaccagcgugcugcagugggccgagaagggcuacuacaccaugagcaacaaccuggugacccuggagaacggcaagcagcugaccgugaagagacagggccuguacuacaucuacgcccaggugaccuucugcagcaacagagaggccagcagccaggcccccuucaucgccagccugugccugaagagccccggcagauucgagagaauccugcugagagccgccaacacccacagcagcgccaagcccugcggccagcagagcauccaccugggcggcguguucgagcugcagcccggcgccagcguguucgugaacgugaccgaccccagccaggugagccacggcaccggcuucaccagcuucggccugcugaagcuguag

SEQ ID NO: 730 - RNA, 786 nt, Artificial Sequence
  CD40LG
augauugagaccuacaaccagaccagccccaggucugcugccaccggccugcccaucuccaugaagaucuucauguaccugcugacuguguuccugaucacccagaugauuggcagcgcccuguuugcuguguaccugcaccggcggcuggacaagauugaagaugaaagaaaccugcaugaagauuuuguguucaugaagaccauccagcgcugcaacacaggagagaggagccugagccugcugaacugugaggagaucaagagccaguuugagggcuuugugaaggacaucaugcugaacaaggaggagaccaagaaggagaacagcuuugagaugcagaagggggaccagaacccccagauugcugcccacgugaucagcgaggccagcagcaagaccaccucugugcugcagugggccgagaagggcuacuacaccaugagcaacaaccuggugacccuggagaauggcaagcagcugacugugaagaggcagggccuguacuacaucuaugcccaggugaccuucugcagcaaccgggaggccagcagccaggcccccuucaucgccagccugugccugaagagcccuggccgcuuugagcgcauccugcugcgggccgccaacacccacagcagcgccaagcccuguggccagcagagcauccaccugggcggcguguuugagcugcagcccggggccucuguguuugugaaugugacagaccccagccaggugucccauggaacaggcuucaccagcuuuggccugcugaagcuguag

SEQ ID NO: 731 - RNA, 786 nt, Artificial Sequence; identical to SEQ ID NO: 730
  CD40LG

SEQ ID NO: 732 - RNA, 786 nt, Artificial Sequence
  CD40LG
augauugagacguacaaucagacaagcccccgaagcgcagcgaccggacuucccauaaguaugaaaaucuuuauguaucugcugaccguguuucuuaucacccaaaugauaggcuccgcucuauuugccguguaucuccaucgcaggcuagauaaaaucgaagaugagcgaaaccugcaugaggacuuuguguucaugaagacuauucagagguguaacacaggugagcguucgcuuucucugcugaauugugaagaaaucaagucccaguuugagggcuucgucaaggauauaaugcugaacaaagaggagaccaagaaggagaacagcuucgaaaugcaaaagggagaccagaacccacaaaucgcagcucacgucauaucagaggccucaucaaaaacaacaucgguucugcaaugggcugaaaagggcuauuauaccaugucuaacaauuuggugaccuuggaaaaugguaaacagcucaccgugaagcggcagggccuuuacuacauauacgcucaggugacuuuuugcucuaaucgggaagccagcagucaggcaccauucauugcuucgcucugccugaaaagcccagggagauuugaacgcauuuuacugcgcgcugcaaacacccacucuagcgcuaagccauguggccaacaguccauacacuuaggcggaguauucgaauuacagccuggcgcuagugucuucguuaauguaacagauccaucccaagugagucacggcaccggcuucaccucuuuuggucuguugaagcuguag

SEQ ID NO: 733 - RNA, 786 nt, Artificial Sequence
  CD40LG
augaucgagaccuacaaccagaccagcccccggagcgccgccaccgguuugccuaucucuaugaagaucuucauguaccuucucacuguuuuucugauuacccagaugaucgguucugcccuguucgcaguguacuugcaccgucgucuggauaaaaucgaagacgagcggaaucuccaugaggauuucguguuuaugaagacaauacagcgcugcaacaccggcgaaagaagucucagcuugcucaacugcgaagagaucaaaagccaguuugagggguucgugaaagacaucaugcucaauaaggaggagacaaaaaaggagaacucauucgaaaugcaaaagggagaucagaacccacagaucgcggcacaugugauuucugaagccuccaguaagacuaccucaguguugcagugggccgagaaaggauacuauacaaugagcaacaaucuggucacccuggagaacggaaaacaauugacaguuaagagacagggccuguacuacauuuaugcccaggugacguucugcuccaaucgugaagcuagcagccaggccccguuuaucgcuucucuaugccugaaaaguccuggaagguuugagcgaauucugcucagagcagcgaauacccacagcagugccaaacccugugggcagcagucuauucaccuuggcggcguguucgagcugcagccgggcgcauccguguucgugaauguaacagacccgagucaagugagucacggcaccgguuuuaccaguuuugggcuuuugaaauuguag

SEQ ID NO: 734 - RNA, 786 nt, Artificial Sequence; identical to SEQ ID NO: 732
  CD40LG

SEQ ID NO: 735 - RNA, 786 nt, Artificial Sequence; identical to SEQ ID NO: 733
  CD40LG

SEQ ID NO: 736 - RNA, 786 nt, Artificial Sequence; identical to SEQ ID NO: 733
  CD40LG

SEQ ID NO: 737 - RNA, 786 nt, Artificial Sequence; identical to SEQ ID NO: 729
  CD40LG

SEQ ID NO: 738 - RNA, 786 nt, Artificial Sequence; identical to SEQ ID NO: 728
  CD40LG

SEQ ID NO: 739 - protein, 24 aa, Artificial Sequence
  signal peptide - HLA-A2-SP
MAVMAPRTLVLLLSGALALTQTWA

SEQ ID NO: 740 - protein, 25 aa, Artificial Sequence
  signal peptide - HLA-A2-SP
MAVMAPRTLVLLLSGALALTQTWAG

SEQ ID NO: 741 - protein, 23 aa, Artificial Sequence
  signal peptide - HsPLAT
MDAMKRGLCCVLLLCGAVFVSPS

SEQ ID NO: 742 - protein, 21 aa, Artificial Sequence
  signal peptide - HsPLAT
MDAMKRGLCCVLLLCGAVFVS

SEQ ID NO: 743 - protein, 22 aa, Artificial Sequence
  signal peptide - HsPLAT
MDAMKRGLCCVLLLCGAVFVSP

SEQ ID NO: 744 - protein, 27 aa, Artificial Sequence
  signal peptide - HsEPO
MGVHECPAWLWLLLSLLSLPLGLPVLG

SEQ ID NO: 745 - protein, 18 aa, Artificial Sequence
  signal peptide - HsALB
MKWVTFISLLFLFSSAYS

SEQ ID NO: 746 - protein, 18 aa, Artificial Sequence
  signal peptide - IgE
MDWTWILFLVAAATRVHS

SEQ ID NO: 747 - protein, 24 aa, Artificial Sequence
  signal peptide - HsCD5
MPMGSLQPLATLYLLGMLVASCLG

SEQ ID NO: 748 - protein, 20 aa, Artificial Sequence
  signal peptide - HsIL2
MYRMQLLSCIALSLALVTNS

SEQ ID NO: 749 - protein, 18 aa, Artificial Sequence
  signal peptide - HsCTRB2
MAFLWLLSCWALLGTTFG

SEQ ID NO: 750 - protein, 19 aa, Artificial Sequence
  signal peptide - immunoglobulin (IgG heavy chain)
MEFGLSWVFLVALFRGVQC

SEQ ID NO: 751 - protein, 19 aa, Artificial Sequence
  signal peptide - human immunoglobulin heavy chain
MDWTWRVFCLLAVTPGAHP

SEQ ID NO: 752 - protein, 19 aa, Artificial Sequence
  signal peptide - human immunoglobulin light chain
MAWSPLFLTLITHCAGSWA

SEQ ID NO: 753 - protein, 17 aa, Artificial Sequence
  signal peptide - GpLuc
MGVKVLFALICIAVAEA

SEQ ID NO: 754 - protein, 21 aa, Artificial Sequence
  signal peptide - MmIgkappa
METDTLLLWVLLLWVPGSTGD

SEQ ID NO: 755 - protein, 26 aa, Artificial Sequence
  signal peptide - NrChit1
MKTHYSSAILPILTLFVFLSINPSHG

SEQ ID NO: 756 - protein, 21 aa, Artificial Sequence
  signal peptide - ClLp1.1
MGMRMMFIMFMLVVLATTVVS

SEQ ID NO: 757 - protein, 24 aa, Artificial Sequence
  signal peptide - NgNep1
MASSLYSFLLALSIVYIFVAPTHS

SEQ ID NO: 758 - protein, 19 aa, Artificial Sequence
  signal peptide - HsAzu1
MTRLTVLALLAGLLASSRA

SEQ ID NO: 759 - protein, 16 aa, Artificial Sequence
  signal peptide - HsCD33
MPLLLLLPLLWAGALA

SEQ ID NO: 760 - protein, 19 aa, Artificial Sequence
  signal peptide - VcCtxB
MIKLKFGVFFTVLLSSAYA

SEQ ID NO: 761 - protein, 20 aa, Artificial Sequence
  signal peptide - HsCST4
MARPLCTLLLLMATLAGALA

SEQ ID NO: 762 - protein, 24 aa, Artificial Sequence
  signal peptide - HsIns-iso1
MALWMRLLPLLALLALWGPDPAAA

SEQ ID NO: 763 - protein, 17 aa, Artificial Sequence
  signal peptide - HsSPARC
MRAWIFFLLCLAGRALA

SEQ ID NO: 764 - protein, 17 aa, Artificial Sequence
  signal peptide - H1N1(Netherlands2009)-HA
MKAILVVLLYTFATANA

SEQ ID NO: 765 - protein, 30 aa, Artificial Sequence
  signal peptide - YFV
MRGLSSRKRRSHDVLTVQFLILGMLLMTGG

SEQ ID NO: 766 - protein, 25 aa, Artificial Sequence
  signal peptide - MHCII
MAISGVPVLGFFIIAVLMSAQESWA

SEQ ID NO: 767 - protein, 24 aa, Artificial Sequence
  signal peptide - JEV
MGKRSAGSIMWLASLAVVIACAGA

SEQ ID NO: 768 - protein, 30 aa, Artificial Sequence
  signal peptide - JEV
MGRKQNKRGGNEGSIMWLASLAVVIACAGA

SEQ ID NO: 769 - protein, 21 aa, Artificial Sequence
  signal peptide - JEV
MNEGSIMWLASLAVVIACAGA

SEQ ID NO: 770 - RNA, 72 nt, Artificial Sequence
  signal peptide - HLA-A2-SP
auggccgucauggcgccccgaacccucguccugcuacucucgggggcucuggcccugacccagaccugggcg

SEQ ID NO: 771 - RNA, 75 nt, Artificial Sequence
  signal peptide - HLA-A2-SP
auggccgucauggcgccccgaacccucguccugcuacucucgggggcucuggcccugacccagaccugggcgggc

SEQ ID NO: 772 - RNA, 69 nt, Artificial Sequence
  signal peptide - HsPLAT
auggaugcaaugaagagagggcucugcugugugcugcugcuguguggagcagucuucguuucgcccagc

SEQ ID NO: 773 - RNA, 63 nt, Artificial Sequence
  signal peptide - HsPLAT
auggaugcaaugaagagagggcucugcugugugcugcugcuguguggagcagucuucguuucg

SEQ ID NO: 774 - RNA, 66 nt, Artificial Sequence
  signal peptide - HsPLAT
auggaugcaaugaagagagggcucugcugugugcugcugcuguguggagcagucuucguuucgccc

SEQ ID NO: 775 - RNA, 81 nt, Artificial Sequence
  signal peptide - HsEPO
augggggugcacgaauguccugccuggcuguggcuucuccugucccugcugucgcucccucugggccucccaguccugggc

SEQ ID NO: 776 - RNA, 54 nt, Artificial Sequence
  signal peptide - HsALB
augaaguggguaaccuuuauuucccuucuuuuucucuuuagcucggcuuauucc

SEQ ID NO: 777 - RNA, 54 nt, Artificial Sequence
  signal peptide - IgE
auggacuggaccuggauccuguuccucguggccgccgcgacccgcguccacagc

SEQ ID NO: 778 - RNA, 72 nt, Artificial Sequence
  signal peptide - HsCD5
augcccauggggucucugcaaccgcuggccaccuuguaccugcuggggaugcuggucgcuuccugccucgga

SEQ ID NO: 779 - RNA, 60 nt, Artificial Sequence
  signal peptide - HsIL2
auguacaggaugcaacuccugucuugcauugcacuaagucuugcacuugucacaaacagu

SEQ ID NO: 780 - RNA, 54 nt, Artificial Sequence
  signal peptide - HsCTRB2
auggcuuuccucuggcuccucuccugcugggcccuccuggguaccaccuucggc

SEQ ID NO: 781 - RNA, 57 nt, Artificial Sequence
  signal peptide - immunoglobulin (IgG heavy chain)
auggaguuugggcugagcuggguuuuccucguugcucuuuuuagagguguccagugu

SEQ ID NO: 782 - RNA, 57 nt, Artificial Sequence
  signal peptide - human immunoglobulin heavy chain
auggacuggaccuggagggucuucuguuugcuggcuguaacuccaggcgcccacccc

SEQ ID NO: 783 - RNA, 57 nt, Artificial Sequence
  signal peptide - human immunoglobulin light chain
auggccugguccccucucuuccucacccucaucacucacugugcaggguccugggcc

SEQ ID NO: 784 - RNA, 51 nt, Artificial Sequence
  signal peptide - GpLuc
augggagugaaaguucuuuuugcccuuauuuguauugcuguggccgaggcc

SEQ ID NO: 785 - RNA, 63 nt, Artificial Sequence
  signal peptide - MmIgkappa
auggagacagacacacuccugcuaugggugcugcugcucuggguuccagguuccacaggugac

SEQ ID NO: 786 - RNA, 78 nt, Artificial Sequence
  signal peptide - NrChit1
augaagacccauuauucaucagcaauucucccgauccucacccucuucgucuuucucucgaucaauccaucccauggc

SEQ ID NO: 787 - RNA, 63 nt, Artificial Sequence
  signal peptide - ClLp1.1
augggcaugcggaugauguucaucauguuuaugcugguugucuuggcaaccacugucguuucc

SEQ ID NO: 788 - RNA, 72 nt, Artificial Sequence
  signal peptide - NgNep1
auggccucgucgcuguauucuuucuuacucgcauuaucgauaguuuacaucuuuguugccccaacacauucu

SEQ ID NO: 789 - RNA, 57 nt, Artificial Sequence
  signal peptide - HsAzu1
augacccggcugacaguccuggcccugcuggcuggucugcuggcguccucgagggcc

SEQ ID NO: 790 - RNA, 48 nt, Artificial Sequence
  signal peptide - HsCD33
augccgcugcugcuacugcugccccugcugugggcaggggcccuggcu

SEQ ID NO: 791 - RNA, 57 nt, Artificial Sequence
  signal peptide - VcCtxB
augauuaaauuaaaauuugguguuuuuuuuacaguuuuacuaucuucagcauaugca

SEQ ID NO: 792 - RNA, 60 nt, Artificial Sequence
  signal peptide - HsCST4
auggcccggccucuguguacccugcuacuccugauggcuacccuggcuggggcucuggcc

SEQ ID NO: 793 - RNA, 72 nt, Artificial Sequence
  signal peptide - HsIns-iso1
auggcccuguggaugcgccuccugccccugcuggcgcugcuggcccucuggggaccugacccagccgcagcc

SEQ ID NO: 794 - RNA, 51 nt, Artificial Sequence
  signal peptide - HsSPARC
augagggccuggaucuucuuucuccuuugccuggccgggagggcucuggca

SEQ ID NO: 795 - RNA, 51 nt, Artificial Sequence
  signal peptide - H1N1(Netherlands2009)-HA
augaaggcaauacuaguaguucugcuauauacauuugcaaccgcaaaugca

SEQ ID NO: 796 - RNA, 90 nt, Artificial Sequence
  signal peptide - YFV
augagaggauuguccucaaggaaacgccguucccaugauguucugacugugcaauuccuaauuuugggaaugcuguugaugacgggugga

SEQ ID NO: 797 - RNA, 75 nt, Artificial Sequence
  signal peptide - MHCII
auggccauaaguggagucccugugcuaggauuuuucaucauagcugugcugaugagcgcucaggaaucaugggcu

SEQ ID NO: 798 - RNA, 72 nt, Artificial Sequence
  signal peptide - JEV
auggguaaacggagcgcuggcucaaucauguggcucgcgagcuuggcaguugucauagcuugugcaggagcc

SEQ ID NO: 799 - RNA, 90 nt, Artificial Sequence
  signal peptide - JEV
augggcagaaagcaaaacaaaagaggaggaaaugaaggcucaaucauguggcucgcgagcuuggcaguugucauagcuugugcaggagcc

SEQ ID NO: 800 - RNA, 63 nt, Artificial Sequence
  signal peptide - JEV
augaaugaaggcucaaucauguggcucgcgagcuuggcaguugucauagcuugugcaggagcc

SEQ ID NO: 801 - RNA, 72 nt, Artificial Sequence
  signal peptide - HLA-A2-SP
auggccgugauggccccgcggacccugguccuccugcugagcggcgcgcucgcccugacccagacgugggcc

SEQ ID NO: 802 - RNA, 75 nt, Artificial Sequence
  signal peptide - HLA-A2-SP
auggccgugauggccccgcggacccugguccuccugcugagcggcgcgcucgcccugacccagacgugggccggg

SEQ ID NO: 803 - RNA, 69 nt, Artificial Sequence
  signal peptide - HsPLAT
auggacgccaugaagcgcggccugugcugcgugcuccugcugugcggggccgucuucgugagccccucc

SEQ ID NO: 804 - RNA, 63 nt, Artificial Sequence
  signal peptide - HsPLAT
auggacgccaugaagcgcggccugugcugcgugcuccugcugugcggggccgucuucgugagc

SEQ ID NO: 805 - RNA, 66 nt, Artificial Sequence
  signal peptide - HsPLAT
auggacgccaugaagcgcggccugugcugcgugcuccugcugugcggggccgucuucgugagcccc

SEQ ID NO: 806 - RNA, 81 nt, Artificial Sequence
  signal peptide - HsEPO
augggcgugcacgagugccccgccuggcuguggcuccugcugagccuccugucccugccgcucgggcugcccguccugggc

SEQ ID NO: 807 - RNA, 54 nt, Artificial Sequence
  signal peptide - HsALB
augaagugggugaccuucaucagccugcucuuccuguucuccagcgccuacucc

SEQ ID NO: 808 - RNA, 54 nt, Artificial Sequence; identical to SEQ ID NO: 777
  signal peptide - IgE

SEQ ID NO: 809 - RNA, 72 nt, Artificial Sequence
  signal peptide - HsCD5
augcccaugggcagccugcagccgcucgccacccuguaccugcucgggaugcugguggccuccugccugggc

SEQ ID NO: 810 - RNA, 60 nt, Artificial Sequence
  signal peptide - HsIL2
auguaccggaugcagcugcucagcugcaucgcccugucgcuggcgcucgugaccaacagc

SEQ ID NO: 811 - RNA, 54 nt, Artificial Sequence
  signal peptide - HsCTRB2
auggccuuccuguggcuccugagcugcugggcccugcucggcaccaccuucggg

SEQ ID NO: 812 - RNA, 57 nt, Artificial Sequence
  signal peptide - immunoglobulin (IgG heavy chain)
auggaguucggccugagcuggguguuccucgucgcccuguuccgcggggugcagugc

SEQ ID NO: 813 - RNA, 57 nt, Artificial Sequence
  signal peptide - human immunoglobulin heavy chain
auggacuggaccuggcgcguguucugccugcucgccgucacccccggcgcccacccg

SEQ ID NO: 814 - RNA, 57 nt, Artificial Sequence
  signal peptide - human immunoglobulin light chain
auggccuggagcccccuguuccucacccugaucacccacugcgccggcuccugggcg

SEQ ID NO: 815 - RNA, 51 nt, Artificial Sequence
  signal peptide - GpLuc
augggcgugaagguccuguucgcccucaucugcaucgccguggcggaggcc

SEQ ID NO: 816 - RNA, 63 nt, Artificial Sequence
  signal peptide - MmIgkappa
auggagaccgacacccugcuccugugggugcugcuccuguggguccccggcagcacgggggac

SEQ ID NO: 817 - RNA, 78 nt, Artificial Sequence
  signal peptide - NrChit1
augaagacccacuacagcuccgccauccugcccauccucacccuguucguguuccugagcaucaacccgucccacggc

SEQ ID NO: 818 - RNA, 63 nt, Artificial Sequence
  signal peptide - ClLp1.1
augggcaugcgcaugauguucaucauguucaugcuggugguccucgccaccaccguggugagc

SEQ ID NO: 819 - RNA, 72 nt, Artificial Sequence
  signal peptide - NgNep1
auggccagcucccuguacagcuuccuccuggcccuguccaucguguacaucuucgucgcgcccacccacagc

SEQ ID NO: 820 - RNA, 57 nt, Artificial Sequence
  signal peptide - HsAzu1
augacccgccugaccgugcucgcccugcuggccggccuccuggcgagcucccgggcc

SEQ ID NO: 821 - RNA, 48 nt, Artificial Sequence
  signal peptide - HsCD33
augccccugcuccugcugcucccgcugcugugggccggcgcccucgcg

SEQ ID NO: 822 - RNA, 57 nt, Artificial Sequence
  signal peptide - VcCtxB
augaucaagcugaaguucggcguguucuucaccguccuccugagcuccgccuacgcc

SEQ ID NO: 823 - RNA, 60 nt, Artificial Sequence
  signal peptide - HsCST4
auggcccgcccccugugcacccuccugcugcucauggccacccuggcgggcgcccuggcc

SEQ ID NO: 824 - RNA, 72 nt, Artificial Sequence
  signal peptide - HsIns-iso1
auggcccuguggaugcgccuccugccccugcucgcccugcuggcgcucuggggcccggaccccgccgccgcc

SEQ ID NO: 825 - RNA, 51 nt, Artificial Sequence
  signal peptide - HsSPARC
augcgcgccuggaucuucuuccugcucugccuggccggccgggcccuggcc

SEQ ID NO: 826 - RNA, 51 nt, Artificial Sequence
  signal peptide - H1N1(Netherlands2009)-HA
augaaggccauccuggugguccuccuguacaccuucgccaccgcgaacgcc

SEQ ID NO: 827 - RNA, 90 nt, Artificial Sequence
  signal peptide - YFV
augcggggccugagcucccgcaagcggcgcagccacgacgugcucaccguccaguuccugauccuggggaugcuccugaugaccggcggg

SEQ ID NO: 828 - RNA, 75 nt, Artificial Sequence
  signal peptide - MHCII
auggccaucagcggcgugcccguccugggguucuucaucaucgccgugcucauguccgcgcaggagagcugggcc

SEQ ID NO: 829 - RNA, 72 nt, Artificial Sequence
  signal peptide - JEV
augggcaagcgcagcgccggguccaucauguggcuggccagccucgcgguggucaucgccugcgccggcgcc

SEQ ID NO: 830 - RNA, 90 nt, Artificial Sequence
  signal peptide - JEV
augggccggaagcagaacaagcgcgggggcaacgaggggagcaucauguggcuggccucccucgccguggucaucgcgugcgccggcgcc

SEQ ID NO: 831 - RNA, 63 nt, Artificial Sequence
  signal peptide - JEV
augaacgagggcagcaucauguggcuggccucccucgccguggucaucgcgugcgccggggcc

SEQ ID NO: 832 - protein, 467 aa, Artificial Sequence; identical to SEQ ID NO: 645
  Ipilimumab backbone Rituximab HC with signale peptide

SEQ ID NO: 833 - protein, 448 aa, Artificial Sequence; identical to SEQ ID NO: 661
  Ipilimumab backbone Rituximab HC without signale peptide

SEQ ID NO: 834 - protein, 235 aa, Artificial Sequence; identical to SEQ ID NO: 677
  Ipilimumab backbone Rituximab LC with signale peptide

SEQ ID NO: 835 - protein, 386 aa, Artificial Sequence
  Ovalbumin Ova
MGSIGAASMEFCFDVFKELKVHHANENIFYCPIAIMSALAMVYLGAKDSTRTQINKVVRFDKLPGFGDSIEAQCGTSVNVHSSLRDILNQITKPNDVYSFSLASRLYAEERYPILPEYLQCVKELYRGGLEPINFQTAADQARELINSWVESQTNGIIRNVLQPSSVDSQTAMVLVNAIVFKGLWEKAFKDEDTQAMPFRVTEQESKPVQMMYQIGLFRVASMASEKMKILELPFASGTMSMLVLLPDEVSGLEQLESIINFEKLTEWTSSNVMEERKIKVYLPRMKMEEKYNLTSVLMAMGITDVFSSSANLSGISSAESLKISQAVHAAHAEINEAGREVVGSAEAGVDAASVSEEFRADHPFLFCIKHIATNAVLFFGRCVSP

SEQ ID NO: 836 - RNA, 1543 nt, Artificial Sequence
  OVA RNActive
ggggcgcugccuacggagguggcagccaucuccuucucggcaucaagcuuaccaugggcagcaucggggccgcgucgauggaguucugcuucgacguguucaaggagcugaagguccaccacgccaacgagaacaucuucuacugcccgaucgccaucaugagcgcgcucgccaugguguaccugggcgccaaggacagcacccggacgcagaucaacaaggugguccgcuucgacaagcugcccggcuucggggacucgaucgaggcgcagugcggcaccagcgugaacgugcacagcucgcuccgggacauccugaaccagaucaccaagccgaacgacgucuacagcuucagccuggccucgcggcucuacgccgaggagcgcuacccgauccugcccgaguaccugcagugcgugaaggagcucuaccggggcgggcuggagccgaucaacuuccagacggcggccgaccaggcccgggagcugaucaacagcuggguggagagccagaccaacggcaucauccgcaacguccuccagccgucgagcguggacagccagaccgcgauggugcuggucaacgccaucguguucaagggccugugggagaagacguucaaggacgaggacacccaggccaugcccuuccgggugaccgagcaggagucgaagccgguccagaugauguaccagaucgggcucuuccggguggcgagcauggccagcgagaagaugaagauccuggagcugccguucgccucgggcacgaugagcaugcucgugcugcugcccgacgaggucagcggccucgagcagcuggagucgaucaucaacuucgagaagcugaccgaguggaccagcagcaacgugauggaggagcgcaagaucaagguguaccucccgcggaugaagauggaggagaaguacaaccugacgucgguccugauggcgauggggaucaccgacguguucagcagcucggccaaccucagcggcaucagcucggccgagagccugaagaucagccaggcggugcacgccgcccacgcggagaucaacgaggccggccgggaggucguggggucggccgaggcgggcguggacgccgccagcgucagcgaggaguuccgcgcggaccacccguuccuguucugcaucaagcacaucgccaccaacgccgugcucuucuucggccggugcgugucgcccugaccacuagugcaucacauuuaaaagcaucucagccuaccaugagaauaagagaaagaaaaugaagaucaauagcuuauucaucucuuuuucuuuuucguugguguaaagccaacacccugucuaaaaaacauaaauuucuuuaaucauuuugccucuuuucucugugcuucaauuaauaaaaaauggaaagaaccuagaucuaaaaaaaaaaaaaaaaaaaaaaaaaaaaaaaaaaaaaaaaaaaaaaaaaaaaaaaaaaaaaaaaugcaucccccccccccccccccccccccccccccccaaaggcucuuuucagagccaccagaauu

SEQ ID NO: 837 - RNA, 1857 nt, Artificial Sequence
  ppLuc
gggagaaagcuugaggauggaggacgccaagaacaucaagaagggcccggcgcccuucuacccgcuggaggacgggaccgccggcgagcagcuccacaaggccaugaagcgguacgcccuggugccgggcacgaucgccuucaccgacgcccacaucgaggucgacaucaccuacgcggaguacuucgagaugagcgugcgccuggccgaggccaugaagcgguacggccugaacaccaaccaccggaucguggugugcucggagaacagccugcaguucuucaugccggugcugggcgcccucuucaucggcguggccgucgccccggcgaacgacaucuacaacgagcgggagcugcugaacagcauggggaucagccagccgaccgugguguucgugagcaagaagggccugcagaagauccugaacgugcagaagaagcugcccaucauccagaagaucaucaucauggacagcaagaccgacuaccagggcuuccagucgauguacacguucgugaccagccaccucccgccgggcuucaacgaguacgacuucgucccggagagcuucgaccgggacaagaccaucgcccugaucaugaacagcagcggcagcaccggccugccgaaggggguggcccugccgcaccggaccgccugcgugcgcuucucgcacgcccgggaccccaucuucggcaaccagaucaucccggacaccgccauccugagcguggugccguuccaccacggcuucggcauguucacgacccugggcuaccucaucugcggcuuccgggugguccugauguaccgguucgaggaggagcuguuccugcggagccugcaggacuacaagauccagagcgcgcugcucgugccgacccuguucagcuucuucgccaagagcacccugaucgacaaguacgaccugucgaaccugcacgagaucgccagcgggggcgccccgcugagcaaggaggugggcgaggccguggccaagcgguuccaccucccgggcauccgccagggcuacggccugaccgagaccacgagcgcgauccugaucacccccgagggggacgacaagccgggcgccgugggcaagguggucccguucuucgaggccaaggugguggaccuggacaccggcaagacccugggcgugaaccagcggggcgagcugugcgugcgggggccgaugaucaugagcggcuacgugaacaacccggaggccaccaacgcccucaucgacaaggacggcuggcugcacagcggcgacaucgccuacugggacgaggacgagcacuucuucaucgucgaccggcugaagucgcugaucaaguacaagggcuaccagguggcgccggccgagcuggagagcauccugcuccagcaccccaacaucuucgacgccggcguggccgggcugccggacgacgacgccggcgagcugccggccgcggugguggugcuggagcacggcaagaccaugacggagaaggagaucgucgacuacguggccagccaggugaccaccgccaagaagcugcggggcggcgugguguucguggacgaggucccgaagggccugaccgggaagcucgacgcccggaagauccgcgagauccugaucaaggccaagaagggcggcaagaucgccguguaagacuaguuauaagacugacuagcccgaugggccucccaacgggcccuccuccccuccuugcaccgagauuaauaaaaaaaaaaaaaaaaaaaaaaaaaaaaaaaaaaaaaaaaaaaaaaaaaaaaaaaaaaaaaaaauauuccccccccccccccccccccccccccccccucuagacaauuggaauu

SEQ ID NO: 838 - DNA, 54 bp, Artificial Sequence
  Mp68 (2010107E04Rik) 5-UTR
ctttcccattctgtagcagaatttggtgttgcctgtggtcttggtcccgcggag

SEQ ID NO: 839 - RNA, 54 nt, Artificial Sequence
  Mp68 (2010107E04Rik) 5-UTR
cuuucccauucuguagcagaauuugguguugccuguggucuuggucccgcggag

SEQ ID NO: 840 - DNA, 108 bp, Artificial Sequence
  Nosip 5-UTR
ctcctgtcgggcggaagtaggaggagtagagtttaaaaacagtactctttttccggttcgggacgtagttgaagcaacgacaagccggataaccgctcttgagacagg

SEQ ID NO: 841 - RNA, 108 nt, Artificial Sequence
  Nosip 5-UTR
cuccugucgggcggaaguaggaggaguagaguuuaaaaacaguacucuuuuuccgguucgggacguaguugaagcaacgacaagccggauaaccgcucuugagacagg

SEQ ID NO: 842 - DNA, 62 bp, Artificial Sequence
  HSD17B4 5-UTR
gtcccgcagtcggcgtccagcggctctgcttgttcgtgtgtgtgtcgttgcaggccttattc

SEQ ID NO: 843 - RNA, 62 nt, Artificial Sequence
  HSD17B4 5-UTR
gucccgcagucggcguccagcggcucugcuuguucgugugugugucguugcaggccuuauuc

SEQ ID NO: 844 - DNA, 84 bp, Artificial Sequence
  Rpl31 5-UTR
cccgtgacccggaagttgtacggctacgcgactttccctcccacaaaccctcgcgcccttcctttcctacttgggcccggcaga

SEQ ID NO: 845 - RNA, 84 nt, Artificial Sequence
  Rpl31 5-UTR
cccgugacccggaaguuguacggcuacgcgacuuucccucccacaaacccucgcgcccuuccuuuccuacuugggcccggcaga

SEQ ID NO: 846 - DNA, 102 bp, Artificial Sequence
  TUBB4B 5-UTR
atataagcgttggcggagcgtcggttgtagcactctgcgcgcccgctcttctgctgctgtttgtctacttcctcctgcttccccgccgccgccgccgccatc

SEQ ID NO: 847 - RNA, 102 nt, Artificial Sequence
  TUBB4B 5-UTR
auauaagcguuggcggagcgucgguuguagcacucugcgcgcccgcucuucugcugcuguuugucuacuuccuccugcuuccccgccgccgccgccgccauc

SEQ ID NO: 848 - DNA, 75 bp, Artificial Sequence; identical to SEQ ID NO: 410
  ATP5A1 5-UTR

SEQ ID NO: 849 - RNA, 75 nt, Artificial Sequence; identical to SEQ ID NO: 411
  ATP5A1 5-UTR

SEQ ID NO: 850 - DNA, 81 bp, Artificial Sequence
  Ndufa4 5-UTR
gtccgctcagccaggttgcagaagcggcttagcgtgtgtcctaatcttctctctgcgtgtaggtaggcctgtgccgcaaac

SEQ ID NO: 851 - RNA, 81 nt, Artificial Sequence
  Ndufa4 5-UTR
guccgcucagccagguugcagaagcggcuuagcguguguccuaaucuucucucugcguguagguaggccugugccgcaaac

SEQ ID NO: 852 - DNA, 70 bp, Artificial Sequence
  RPS9 3-UTR
gtccacctgtccctcctgggctgctggattgtctcgttttcctgccaaataaacaggatcagcgctttac

SEQ ID NO: 853 - RNA, 70 nt, Artificial Sequence
  RPS9 3-UTR
guccaccugucccuccugggcugcuggauugucucguuuuccugccaaauaaacaggaucagcgcuuuac

SEQ ID NO: 854 - DNA, 57 bp, Artificial Sequence
  PSMB3 3-UTR
ccctgttcccagagcccacttttttttctttttttgaaataaaatagcctgtctttc

SEQ ID NO: 855 - RNA, 57 nt, Artificial Sequence
  PSMB3 3-UTR
cccuguucccagagcccacuuuuuuuucuuuuuuugaaauaaaauagccugucuuuc

SEQ ID NO: 856 - DNA, 121 bp, Artificial Sequence
  CASP1 3-UTR
aataaggaaactgtatgaatgtctgtgggcaggaagtgaagagatccttctgtaaaggtttttggaattatgtctgctgaataataaacttttttgaaataataaatctggtagaaaaatg

SEQ ID NO: 857 - RNA, 121 nt, Artificial Sequence
  CASP1 3-UTR
aauaaggaaacuguaugaaugucugugggcaggaagugaagagauccuucuguaaagguuuuuggaauuaugucugcugaauaauaaacuuuuuugaaauaauaaaucugguagaaaaaug

SEQ ID NO: 858 - DNA, 137 bp, Artificial Sequence
  COX6B1 3-UTR
actggctgcatctccctttcctctgtcctccatccttctcccaggatggtgaagggggacctggtacccagtgatccccaccccaggatcctaaatcatgacttacctgctaataaaaactcattggaaaagtgaga

SEQ ID NO: 859 - RNA, 137 nt, Artificial Sequence
  COX6B1 3-UTR
acuggcugcaucucccuuuccucuguccuccauccuucucccaggauggugaagggggaccugguacccagugauccccaccccaggauccuaaaucaugacuuaccugcuaauaaaaacucauuggaaaagugaga

SEQ ID NO: 860 - RNA, 1621 nt, Artificial Sequence; identical to SEQ ID NO: 594
  Ipilimumab HC with signale peptide

SEQ ID NO: 861 - RNA, 1621 nt, Artificial Sequence
  Ipilimumab HC with signale peptide
gggagaaagcuuaccauggagcucggccucuccuggaucuuccuccucgccauccucaagggcguccagugccagguccagcucgucgaguccggcggcggcgucguccagcccggccgcucccuccgccucuccugcgccgccuccggcuucaccuucuccuccuacaccaugcacuggguccgccaggcccccggcaagggccucgagugggucaccuucaucuccuacgacggcaacaacaaguacuacgccgacuccgucaagggccgcuucaccaucucccgcgacaacuccaagaacacccucuaccuccagaugaacucccuccgcgccgaggacaccgccaucuacuacugcgcccgcaccggcuggcucggccccuucgacuacuggggccagggcacccucgucaccgucuccuccgccuccaccaagggccccuccgucuucccccucgcccccuccuccaaguccaccuccggcggcaccgccgcccucggcugccucgucaaggacuacuuccccgagcccgucaccgucuccuggaacuccggcgcccucaccuccggcguccacaccuuccccgccguccuccaguccuccggccucuacucccucuccuccgucgucaccguccccuccuccucccucggcacccagaccuacaucugcaacgucaaccacaagcccuccaacaccaaggucgacaagcgcgucgagcccaaguccugcgacaagacccacaccugcccccccugccccgcccccgagcuccucggcggccccuccgucuuccucuucccccccaagcccaaggacacccucaugaucucccgcacccccgaggucaccugcgucgucgucgacgucucccacgaggaccccgaggucaaguucaacugguacgucgacggcgucgagguccacaacgccaagaccaagccccgcgaggagcaguacaacuccaccuaccgcgucgucuccguccucaccguccuccaccaggacuggcucaacggcaaggaguacaagugcaaggucuccaacaaggcccuccccgcccccaucgagaagaccaucuccaaggccaagggccagccccgcgagccccaggucuacacccucccccccucccgcgacgagcucaccaagaaccaggucucccucaccugccucgucaagggcuucuaccccuccgacaucgccgucgagugggaguccaacggccagcccgagaacaacuacaagaccaccccccccguccucgacuccgacggcuccuucuuccucuacuccaagcucaccgucgacaagucccgcuggcagcagggcaacgucuucuccugcuccgucaugcacgaggcccuccacaaccacuacacccagaagucccucucccucucccccggcaagugaggacuaguuauaagacugacuagcccgaugggccucccaacgggcccuccuccccuccuugcaccgagauuaauaaaaaaaaaaaaaaaaaaaaaaaaaaaaaaaaaaaaaaaaaaaaaaaaaaaaaaaaaaaaaaaaugcaucccccccccccccccccccccccccccccccaaaggcucuuuucagagccaccagaauu

SEQ ID NO: 862 - RNA, 1621 nt, Artificial Sequence
  Ipilimumab HC with signale peptide
gggagaaagcuuaccauggagcugggccucagcuggaucuuccuucuggccauuuugaagggggugcagugccaaguccaguuaguugaauccggagguggcgugguacagcccgggagaucucugaggcuaucaugugcugcaaguggauuuaccuucagcuccuacacaaugcacugggugcggcaggccccuggcaaaggucucgagugggucacuuuuauaucuuaugacgggaacaauaaguacuaugcggauucggugaaaggacgcuucacgaucucacgagacaacagcaagaauacccuguaccuucaaaugaacagucugcgugcugaagauacagccauuuauuacugcgcaagaacuggcugguugggcccauuugacuauugggggcagggaacccucguuacaguguccucugccagcaccaaagguccguccgucuucccccuggcuccuucaaguaagagcacuucuggcgggacagcagcccugggaugucucgugaaggauuacuuuccagagcccguaaccguuuccuggaacucaggcgcuuuaacgagcggugugcauacuuucccugccguccugcagaguucugggcuuuacuccuugagcucgguggugaccgucccaucuuccucacugggaacacagacuuauaucugcaauguuaaucacaaacccaguaacaccaagguggacaaaaggguagaaccuaagagcugugauaaaacacauaccugcccaccgugucccgcgccugagcuacucggcggcccauccguguuucuguuucccccuaagccaaaggacacgcuuaugauuucucggacucccgaggucacaugcgugguuguggaugucagccacgaagacccggaggugaaauuuaauugguacguagaugggguugaagugcauaacgcaaagaccaaaccucgcgaggagcaauauaauucaacuuacagagucgugaguguccugacaguguugcaccaggacuggcucaacggaaaggaauauaaauguaagguuuccaauaaagcccugcccgcuccaaucgagaagaccauaagcaaggccaaaggucagccuagggaaccccagguguacacguuaccacccucucgggaugagcugaccaagaaccaaguaucacucacaugccuugucaaaggcuucuauccuagugacaucgcaguggaaugggagagcaaugggcagccagagaacaacuacaagacuaccccgcccguucuggacuccgauggaucuuucuucuuguacucgaaacuaacaguggacaagagccgcuggcagcaaggcaaugucuucuccuguucagugaugcacgaagcucugcauaaccacuauacucagaagagucucucucugagcccugguaaaugaggacuaguuauaagacugacuagcccgaugggccucccaacgggcccuccuccccuccuugcaccgagauuaauaaaaaaaaaaaaaaaaaaaaaaaaaaaaaaaaaaaaaaaaaaaaaaaaaaaaaaaaaaaaaaaaugcaucccccccccccccccccccccccccccccccaaaggcucuuuucagagccaccagaauu

SEQ ID NO: 863 - RNA, 1621 nt, Artificial Sequence
  Ipilimumab HC with signale peptide
gggagaaagcuuaccauggagcugggccugagcuggaucuuccugcuggccauccugaagggcgugcagugccaggugcagcugguggagagcggcggcggcguggugcagcccggcagaagccugagacugagcugcgccgccagcggcuucaccuucagcagcuacaccaugcacugggugagacaggcccccggcaagggccuggagugggugaccuucaucagcuacgacggcaacaacaaguacuacgccgacagcgugaagggcagauucaccaucagcagagacaacagcaagaacacccuguaccugcagaugaacagccugagagccgaggacaccgccaucuacuacugcgccagaaccggcuggcugggccccuucgacuacuggggccagggcacccuggugaccgugagcagcgccagcaccaagggccccagcguguucccccuggcccccagcagcaagagcaccagcggcggcaccgccgcccugggcugccuggugaaggacuacuuccccgagcccgugaccgugagcuggaacagcggcgcccugaccagcggcgugcacaccuuccccgccgugcugcagagcagcggccuguacagccugagcagcguggugaccgugcccagcagcagccugggcacccagaccuacaucugcaacgugaaccacaagcccagcaacaccaagguggacaagagaguggagcccaagagcugcgacaagacccacaccugcccccccugccccgcccccgagcugcugggcggccccagcguguuccuguucccccccaagcccaaggacacccugaugaucagcagaacccccgaggugaccugcguggugguggacgugagccacgaggaccccgaggugaaguucaacugguacguggacggcguggaggugcacaacgccaagaccaagcccagagaggagcaguacaacagcaccuacagaguggugagcgugcugaccgugcugcaccaggacuggcugaacggcaaggaguacaagugcaaggugagcaacaaggcccugcccgcccccaucgagaagaccaucagcaaggccaagggccagcccagagagccccagguguacacccugccccccagcagagacgagcugaccaagaaccaggugagccugaccugccuggugaagggcuucuaccccagcgacaucgccguggagugggagagcaacggccagcccgagaacaacuacaagaccaccccccccgugcuggacagcgacggcagcuucuuccuguacagcaagcugaccguggacaagagcagauggcagcagggcaacguguucagcugcagcgugaugcacgaggcccugcacaaccacuacacccagaagagccugagccugagccccggcaagugaggacuaguuauaagacugacuagcccgaugggccucccaacgggcccuccuccccuccuugcaccgagauuaauaaaaaaaaaaaaaaaaaaaaaaaaaaaaaaaaaaaaaaaaaaaaaaaaaaaaaaaaaaaaaaaaugcaucccccccccccccccccccccccccccccccaaaggcucuuuucagagccaccagaauu

SEQ ID NO: 864 - RNA, 1621 nt, Artificial Sequence
  Ipilimumab HC with signale peptide
gggagaaagcuuaccauggagcugggccucagcuggaucuuccugcuugccauucugaagggggugcagugccaaguccagcucguugaauccggaggcgggguggugcagcccggaagaucucugcggcuuagcugugcugccuccggcuuuaccuucucuagcuacacaaugcacuggguccgccaggcgccugggaaaggacuggagugggugacguuuaucuccuaugacggcaacaauaaguacuaugcugauucuguuaaaggcagauucaccauuagccgggacaacuccaagaauacacucuaccugcaaaugaacagccugcgcgccgaagauaccgccaucuauuacugcgcuagaacaggguggcucggaccguuugacuauuggggccaggggacccuggugacagucucuuccgccagcaccaaaggacccucuguguucccucuugcucccuccagcaagucuacguccggcgggaccgccgcgcugggaugucucguuaaggauuacuuuccugagcccgugacagucagcuggaacuccggcgcccugaccucuggcgugcauacauucccugcugugcuucagagcuccgggcuguacagccucucuuccgucguuaccgugccgagcucuagccugggaacgcagacauauauuugcaaugugaaucacaaacccuccaacaccaaggucgacaaacggguggaaccuaagucuugugauaaaacacauaccugucccccuugccccgccccggagcugcucggcgggccuagcguuuuucuguuucccccuaagcccaaggacacccuuaugaucucccgcacacccgaggugacgugcgucgugguugaugugagccacgaagacccugaggucaaauucaauugguacguggauggagucgaagugcauaacgcuaagaccaaaccgagagaggagcaauauaauucuacauaccggguuguguccguccugaccgugcuccaccaggacuggcugaacggcaaggaauauaaauguaagguuagcaauaaagcccuucccgcgccuaucgagaagacaauuucuaaggccaaagggcagccccgcgaaccucagguguacacccugcccccguccagagaugagcucacgaagaaccaagucagccugacaugccuggugaaaggauucuauccuuccgacaucgcuguggaaugggagucuaauggccagcccgagaacaacuacaagaccaccccucccguucucgacagcgauggcuccuuuuuccuguacucuaaacuuacagucgacaagagccgguggcagcaagggaauguguucuccuguagcgugaugcacgaagcccugcauaaccacuauacccagaagucucucucccugagcccuggaaaaugaggacuaguuauaagacugacuagcccgaugggccucccaacgggcccuccuccccuccuugcaccgagauuaauaaaaaaaaaaaaaaaaaaaaaaaaaaaaaaaaaaaaaaaaaaaaaaaaaaaaaaaaaaaaaaaaugcaucccccccccccccccccccccccccccccccaaaggcucuuuucagagccaccagaauu

SEQ ID NO: 865 - RNA, 1621 nt, Artificial Sequence
  Ipilimumab HC with signale peptide
gggagaaagcuuaccauggaauuagguuuauccuggaucuuucuccuagcaauacucaaaggaguacaaugccaaguacaauuaguggaauccggaggagguguaguacaaccaggaagaucacuaagacuaucaugcgcagcaucaggauuuacauucucaucauacacaaugcacuggguaagacaagccccaggaaaaggauuagaauggguuacauuuauauccuacgacggaaacaauaaauacuacgcagacucagucaaaggaagauucacuauaucaagagacaauucuaaaaacacacuauaccuacaaaugaacucucuccgagcagaagauacagccauauacuacugcgcaagaacaggaugguuaggaccuuucgacuacuggggacaaggaacucuaguaacugucucaucugccucaacaaaaggcccaucaguauuuccacuagccccaucaucuaaaucuacaucagguggaaccgcugcauuaggaugcuuaguaaaagacuauuuucccgaaccaguaacuguaucuuggaacuccggagcacuuacuucugguguacacacauucccagcaguuuuacaaagcucaggacuauacucucuaagcucaguaguaacugucccaucaucaucccuuggcacccaaacauacauauguaacguaaaucacaaacccaguaauaccaaaguagacaaaagaguagaacccaaaucaugugauaaaacacacacaugcccccccugcccagcaccugaacuucuaggaggaccaucuguauuccucuucccuccaaaaccaaaagauacucucaugauaucacgcacacccgaaguaacuugugucguaguagacguaucacacgaagacccagaaguuaaauucaacugguauguagacggaguagaaguccacaacgcaaaaacaaaaccacgagaagaacaauacaacuccaccuaucgcguaguuucaguacuuacaguucuccaccaagauuggcuaaacggaaaagaauacaaaugcaaaguaucaaauaaagcuuuaccugcaccaauagaaaaaacaauaaguaaagcaaaaggucaaccacgagaaccccaaguauauacacuuccaccaucaagagacgaacuuaccaaaaaccaagucucacucacaugcuuaguaaaaggauuuuacccaucagauauagcaguagaaugggaauccaauggacaaccagaaaauaauuacaaaaccacaccaccuguacuagauucagacggcucuuucuuucuauacucuaaacuaacaguugauaaaucacgauggcaacaaggcaauguauucucuuguucugucaugcaugaagcacuacacaaccacuacacacaaaaaucacuaucacuaucccccggcaaaugaggacuaguuauaagacugacuagcccgaugggccucccaacgggcccuccuccccuccuugcaccgagauuaauaaaaaaaaaaaaaaaaaaaaaaaaaaaaaaaaaaaaaaaaaaaaaaaaaaaaaaaaaaaaaaaaugcaucccccccccccccccccccccccccccccccaaaggcucuuuucagagccaccagaauu

SEQ ID NO: 866 - RNA, 1621 nt, Artificial Sequence
  Ipilimumab HC with signale peptide
gggagaaagcuuaccauggagcugggccucagcuggaucuuccuguuggccauucugaagggggugcagugccaaguccagcucguggaauccgguggcgggguagugcagcccggcaggagucugcgguugagcugugcagccuccgguuuuaccuucaguagcuacacuaugcacuggguccgccaggcgccagggaaaggccuggagugggugaccuuuaucuccuaugacggcaacaauaaguacuaugccgauagcgugaaagggagguucacgauuucccgggacaacaguaagaauacucucuaccugcaaaugaacagccugcgcgcagaagauaccgccaucuauuacugcgcaaggaccgguuggcucggcccguuugacuauugggggcagggcacucuggucaccguguccagcgccaguacgaaaggucccuccguauucccauuggcgcccagcuccaagaguacuagcgggggcaccgccgcacugggcugucucgugaaggauuacuuuccagagcccgucacuguguccuggaauagcggggcccugaccaguggugugcauaccuucccagccguccugcaguccagcggcuuguacagucucuccagcgugguaacggugccgagcuccagucuggggacucagaccuauauuugcaacgucaaucacaaacccagcaacacuaagguggacaaacggguggaaccaaaguccugugauaaaacccauaccugucccccaugccccgcaccggagcugcucggcggucccagcgucuuucuguucccacccaagccaaaagacacuuugaugaucagucgcacgcccgaggugaccugcguaguggucgaugugucccacgaagacccagaggucaaguuuaauugguacguggauggcguggaaguacauaacgccaagacuaaaccgagggaggagcaauauaauagcaccuaccggguggucuccgugcugaccguccuccaccaggacuggcugaacgggaaggaauauaaauguaaggugaguaauaaagcgcugcccgccccaaucgagaagacuauuagcaaggcaaaaggccagccccgcgaaccacagguguacacguugcccccguccagggaugagcucaccaagaaccaaguaagccugacuugccuggugaaaggguucuauccaagugacaucgccgucgaaugggaguccaauggucagcccgagaacaacuacaagaccacucccccagugcucgacagcgauggcuccuucuuucuguacaguaaauugaccgucgacaagagccgguggcagcaagggaauguguucuccugcagcgugaugcacgaagcacugcauaaccacuauacgcagaagagucucucccugagccccggcaaaugaggacuaguuauaagacugacuagcccgaugggccucccaacgggcccuccuccccuccuugcaccgagauuaauaaaaaaaaaaaaaaaaaaaaaaaaaaaaaaaaaaaaaaaaaaaaaaaaaaaaaaaaaaaaaaaaugcaucccccccccccccccccccccccccccccccaaaggcucuuuucagagccaccagaauu

SEQ ID NO: 867 - RNA, 1621 nt, Artificial Sequence
  Ipilimumab HC with signale peptide
gggagaaagcuuaccauggaacucggccuaagcuggaucuuccuccuggccauccucaaaggcguacagugccagguccaacucguagaauccggaggcggcgucguacaacccggccgcucccuccgccuauccugcgcagcuuccggcuucacauucaguucauacaccaugcacuggguccgacaagcccccggcaaaggacucgaaugggucacuuuuaucucuuacgacggcaacaauaaauacuacgcagacuccgucaaaggccgcuuuacaaucucacgugacaacuccaaaaacacccuauaccuccaaaugaacucccuacgcgcugaagacaccgccauuuacuauugcgcccgcacaggcuggcuuggaccauucgacuacuggggacaaggaacccuugucaccgucuccucugccagcaccaaaggccccuccgucuucccccucgcucccagcuccaaauccacgucaggcggcacugcagcccucggaugccuagucaaagacuacuuccccgaacccgucacagucucauggaacuccggagcccucacuucaggcguccacaccuuccccgcaguacuacaaucuucaggccuauacucccuaagcuccgucgucaccguacccuccucaucccucggaacacaaaccuacauaugcaacgucaaccacaaacccucaaacacaaaaguagacaaacgcgucgaacccaaauccugcgacaaaacccauaccugcccacccugccccgccccggaacuccuaggcggccccagcgucuucuuauucccacccaaacccaaagacacgcucaugauaaguagaacccccgaagugaccugcgucgucgucgacgucucccacgaagacccugaaguuaaauucaacugguacgucgacggcgucgaaguucacaacgccaaaaccaaaccccgagaagaacaauacaacuccaccuaccgagucgucucaguacuaacaguccuccaccaagacuggcucaacggaaaagaauacaaaugcaaagucuccaacaaagcacuaccugccccaaucgagaaaacaaucuccaaagccaaaggacaaccccgugaaccccagguauacacccuacccccaucacgcgacgaacucaccaaaaaucaggucagccuaaccugccucgucaaaggauucuaccccuccgacaucgccgucgaaugggaaagcaacggccaacccgaaaacaacuacaaaaccaccccacccguacucgacuccgacggcuccuucuuccucuacuccaagcucaccgucgacaaaucccgcuggcaacagggaaacguauucuccugcuccgucaugcacgaagcccuccacaaccacuauacccaaaaaucacucucccuaucacccggaaaauaaggacuaguuauaagacugacuagcccgaugggccucccaacgggcccuccuccccuccuugcaccgagauuaauaaaaaaaaaaaaaaaaaaaaaaaaaaaaaaaaaaaaaaaaaaaaaaaaaaaaaaaaaaaaaaaaugcaucccccccccccccccccccccccccccccccaaaggcucuuuucagagccaccagaauu

SEQ ID NO: 868 - RNA, 1621 nt, Artificial Sequence
  Ipilimumab HC with signale peptide
gggagaaagcuuaccauggaacuaggccuaucauggaucuuccuccucgccauccucaaaggcguccaaugccagguccaacucgucgaauccggcggaggcgucguccaacccggccgaucacuccgccucuccugcgccgccuccggcuucacuuucuccuccuacacaaugcacuggguacgccaagccccaggaaaaggacucgaaugggucaccuucaucuccuacgacggaaacaacaaauacuacgccgacagcguuaaaggacgauucacaaucucccgcgacaacucuaaaaacacccuauaccuccaaaugaacucccuccgcgccgaagacacagcaaucuacuacugcgccagaaccggauggcuaggccccuucgacuacuggggccaaggaacccucgucacaguauccuccgccuccaccaaaggcccuuccguauuuccccuggcccccucauccaaauccaccagcggcggaaccgccgcacuuggcugccucguaaaagacuacuuccccgaacccguaaccgucuccuggaacagcggcgcccuaacgucaggcguacacaccuuccccgcaguccuccaauccuccggacuauauagccucuccagcguaguaacaguacccuccagcucucucggcacacaaaccuauaucugcaacguaaaccacaaacccagcaacaccaaaguugacaaacgcguugaacccaaauccugcgacaaaacccacacaugcccacccugccccgcccccgaacuccucggcggucccucagucuuccucuucccaccaaaaccuaaagacacucuaaugauaucccgcaccccagaagugaccugcgucguagucgacgucucccacgaagaccccgaagucaaauucaacugguacgucgacggcgucgaaguacacaacgccaaaaccaaaccccgagaagaacaauacaacucaaccuacagagucgucagcguccucaccguccuccaucaggacuggcucaacggaaaagaauacaaaugcaaagucuccaacaaagcccuaccagcacccauagagaaaaccaucuccaaagccaagggccaaccacgcgaaccccaaguauacacacucccacccucacgagacgaacucaccaagaaccaaguaucuuuaaccugccuugucaaaggcuucuaccccuccgacaucgccguggaaugggaauccaacggacaacccgaaaacaacuacaagaccacaccacccguccuugacucagacggcuccuucuuccucuauuccaaacuuaccgucgacaaaucccgauggcaacaaggcaacgucuucuccugcucaguaaugcacgaagcccuacacaaccacuacacgcaaaaaucacucucccugucccccggaaaaugaggacuaguuauaagacugacuagcccgaugggccucccaacgggcccuccuccccuccuugcaccgagauuaauaaaaaaaaaaaaaaaaaaaaaaaaaaaaaaaaaaaaaaaaaaaaaaaaaaaaaaaaaaaaaaaaugcaucccccccccccccccccccccccccccccccaaaggcucuuuucagagccaccagaauu

SEQ ID NO: 869 - RNA, 1621 nt, Artificial Sequence
  Ipilimumab HC with signale peptide
gggagaaagcuuaccauggaacuuggccuuuccuggaucuuccuccucgccauacucaaaggcguccaaugccaaguucagcuagucgaauccgguggcggcguaguccaacccggacgcagccuccgacuauccugcgccgccuccggauucaccuucuccucauacaccaugcacuggguccgccaagcccccggcaaaggccucgaaugggucacauucaucuccuacgauggaaacaacaaauacuacgccgacucagucaaaggccgcuucacaaucucccgagacaacuccaaaaacacccuauaccuccaaaugaacucacuuagagccgaagacacagcaauauacuacugcgcccgcaccggauggcuaggacccuucgacuacuggggccaagggacccucgucaccguuagcuccgccuccacaaaaggacccuccguauucccccucgccccauccuccaaauccacaucuggcggcaccgccgcacucggaugccucguaaaagacuacuuccccgaacccgucacagucagcuggaacucaggcgcucucaccuccggcguccacacauucccggcaguccugcaaagcagcggccucuacucccuaucaucuguagucaccgucccauccucuucccucggcacccaaaccuacaucugcaacguaaaccacaaacccagcaacaccaaaguggauaaacgaguagaacccaaaucuugcgacaaaacccacacuugcccacccugccccgccccagaacuucuaggcggacccuccgucuuccucuucccacccaaacccaaagacacccucaugaucucacgcacccccgagguaaccugcguugucgucgacgugucccacgaagacccugaagucaaguucaacugguacgucgacggcgucgaagugcacaacgccaaaacaaaaccacgcgaagaacaauauaacucaaccuaccgcguagucuccguccuaaccguccuccaccaagacuggcuaaacggcaaagaauacaaauguaaaguauccaauaaagcacuccccgcccccauagagaaaacgaucuccaaggccaaaggucaaccacgcgaaccccaaguauacacccuaccaccaucccgcgacgaacucaccaaaaaccaaguaucccuaaccugccuagucaaaggcuucuaccccuccgacaucgcaguagaaugggaauccaacggccaaccagaaaacaacuacaagacaacaccucccguccucgacuccgacggauccuucuucuuauacucaaaacuaaccgucgacaaaucuagauggcaacaaggcaacgucuucucaugcuccguaaugcacgaagcucuccacaaccacuacacccaaaaaucacucucccucucccccggcaaaugaggacuaguuauaagacugacuagcccgaugggccucccaacgggcccuccuccccuccuugcaccgagauuaauaaaaaaaaaaaaaaaaaaaaaaaaaaaaaaaaaaaaaaaaaaaaaaaaaaaaaaaaaaaaaaaaugcaucccccccccccccccccccccccccccccccaaaggcucuuuucagagccaccagaauu

SEQ ID NO: 870 - RNA, 1621 nt, Artificial Sequence
  Ipilimumab HC with signale peptide
gggagaaagcuuaccauggaacuaggacucucauggauauuuuuacuagccauacucaaaggcguccaaugucaaguacaacuaguagaaucaggcggaggaguuguccaacccggccgaucccuccgcuuaucaugugcagcaucuggauucacauuuucaucauacacaaugcacugggucagacaagccccaggaaaagguuuagaauggguaacauuuauaucauacgacgguaacaacaaauacuaugcagacucaguaaaaggaagauuuacaaucagcagagacaauagcaaaaacacacuauaccuacaaaugaacucccuacgagcagaagacacagccaucuauuacugugcacgaacaggauggcuaggaccauucgauuacuggggccaaggaacauuagucaccguaucuucugcauccacaaaagguccuucaguauuuccauuagcacccagcuccaaaucuacaucuggcggaacagccgccuuaggaugcuuaguuaaagauuacuuuccagaaccaguaacaguuucauggaacucaggagcucuaacaucuggaguacacacauuuccagcaguccuacaaucauccggacuauauucacuaucaucaguaguaacuguccccucaucaucauuaggcacacaaacuuauauuugcaauguaaaccauaaaccaucaaauacaaaagucgacaaaagaguagaaccaaaaucaugcgacaaaacccacacauguccacccugccccgccccagaauuauuaggaggaccaucugucuuccuuuucccaccaaaaccaaaagacaccuuaaugauaucucgaacuccagaaguaacauguguaguuguagauguuucacaugaagacccagaaguaaaauucaacugguacgucgacggaguagaaguacacaaugcaaaaacaaaaccccgagaagaacaauacaacuccacauacagaguagucucaguacuaacaguacuccaucaagacuggcuaaacggaaaagaauacaaauguaaaguaaguaauaaagcacuacccgcaccaauagaaaaaacaauaucaaaagcaaaaggacaaccaagagaaccacaaguauauacacuaccuccauccagagaugaauuaacaaaaaaccaaguaagucuaacauguuuaguaaaaggauucuaucccagcgacauagcagucgaaugggaaucaaauggacaaccagaaaacaacuauaaaaccacaccaccaguauuagauucagacggaucauuuuuccuuuacucaaaauuaacaguagacaaauccagauggcaacaaggcaaugucuuuucaugcucugucaugcacgaagcucuacauaaucacuacacucaaaaaucacuaucacucucaccaggcaaaugaggacuaguuauaagacugacuagcccgaugggccucccaacgggcccuccuccccuccuugcaccgagauuaauaaaaaaaaaaaaaaaaaaaaaaaaaaaaaaaaaaaaaaaaaaaaaaaaaaaaaaaaaaaaaaaaugcaucccccccccccccccccccccccccccccccaaaggcucuuuucagagccaccagaauu

SEQ ID NO: 871 - RNA, 1621 nt, Artificial Sequence
  Ipilimumab HC with signale peptide
gggagaaagcuuaccauggaacuaggacuauccuggauauuucuacuagccauccuaaaaggaguacaaugucaaguacaauuaguagaauccggaggcggaguaguccaacccggaagaucacuaagacucaguugugcagcaucaggauucacauuuucaucauauacaaugcacuggguuagacaagcacccggaaaaggacucgaauggguaaccuuuaucuccuacgauggaaacaauaaauauuacgcagauucuguaaaaggccgauucacaauaucaagagacaacucuaaaaauacauuauaccuacaaaugaacucuuuaagagcagaagacacagcaauauauuacugugcaagaacaggauggcucggaccauucgacuauuggggacaaggaaccuuaguaacaguauccagcgcuagcacaaaaggcccuucugucuucccauuagcaccauccucaaaaucaacuucuggcggaacagcagcucuaggaugcuuaguaaaagauuauuuuccagaaccaguuacuguauccuggaacucaggagcacuaaccaguggaguucacacauuuccagccguauuacaaucauccggauuauauucauuaucauccgucguaaccguaccaagcucaucauuaggaacacaaacauacauaugcaacguaaaucacaaaccauccaauacaaaaguagauaaaagaguagaaccuaaauccugugauaaaacacacacaugcccaccaugcccagcaccagaauuacuaggaggaccaucaguauuccuauucccaccaaaaccaaaagauacacuaaugauaucaagaacaccagaaguaacuuguguagucguagacgucucacaugaagacccagaaguaaaauuuaauugguauguugacggagucgaaguacacaacgccaaaacaaaaccacgagaagaacaauacaacucaacauauagaguaguaucuguauuaacaguauuacaucaagauugguuaaacggaaaagaauacaaauguaaaguaucaaauaaagcucuaccagcaccaauagaaaagacaaucucaaaagcaaaaggccaaccucgagaaccacaaguauacacacuaccaccaucaagagacgaauuaaccaaaaaccaagucucauuaacaugcuuaguuaaagguuucuaccccagcgacaucgcaguugaaugggaaucaaacggucaaccugaaaacaacuauaaaacaacaccaccaguuuuagacucagauggauccuuuuucuuauacucaaaauuaacaguugacaaaucaagauggcaacaaggaaaugucuuuucauguuccgucaugcaugaagcacuacacaaccauuacacccaaaaaucacucucacuaucacccgguaaauaaggacuaguuauaagacugacuagcccgaugggccucccaacgggcccuccuccccuccuugcaccgagauuaauaaaaaaaaaaaaaaaaaaaaaaaaaaaaaaaaaaaaaaaaaaaaaaaaaaaaaaaaaaaaaaaaugcaucccccccccccccccccccccccccccccccaaaggcucuuuucagagccaccagaauu

SEQ ID NO: 872 - RNA, 1621 nt, Artificial Sequence
  Ipilimumab backbone Rituximab HC with signale peptide
gggagaaagcuuaccauggagcugggccucagcuggaucuuccugcuggccauccucaagggggugcagugccaggugcagcuggucgagagcggcgggggcguggugcagcccgggcgcucccuccggcugagcugcgccgccuccggcuucaccuucagcuccuacaccaugcacuggguccgccaggcgccggggaagggccuggagugggugacguucaucagcuacgacggcaacaacaaguacuacgccgacuccgugaaggggcgguucaccaucagccgcgacaacuccaagaacacccucuaccugcagaugaacagccugcgggccgaggacaccgccaucuacuacugcgcccgcacgggcuggcucgggcccuucgacuacuggggccaggggacccuggucaccguguccagcgcguccaccaagggccccagcguguucccccuggccccguccagcaaguccacgagcggcgggaccgccgcccucggcugccuggucaaggacuacuuccccgagcccgugaccguguccuggaacagcggggcgcugaccagcggcguccacacguuccccgccgugcuccaguccagcggccuguacucccugagcuccguggucaccgugccgagcuccagccucgggacccagaccuacaucugcaacgugaaccacaagcccuccaacacgaaggucgacaagcggguggagcccaagagcugcgacaagacccacacgugcccgcccugccccgcccccgagcugcugggcggcccgagcguguuccucuucccgcccaagcccaaggacacccugaugaucagccgcacccccgaggucacgugcgugguggucgacgugagccacgaggaccccgaggugaaguucaacugguacgucgacgggguggaggugcacaacgccaagaccaagccccgggaggagcaguacaacagcaccuaccgcgucgugagcgugcugaccguccuccaccaggacuggcugaacggcaaggaguacaagugcaaggugucgaacaaggcccugccggcccccaucgagaagacgaucagcaaggcgaagggccagccgcgggagccccaggucuacacccucccgcccagccgcgacgagcugaccaagaaccaggugucccugacgugccucgugaagggcuucuaccccagcgacaucgccgucgagugggagagcaacgggcagcccgagaacaacuacaagaccacgcccccggugcuggacuccgacggcagcuucuuccuguacuccaagcucaccguggacaagagccgguggcagcaggggaacgucuucuccugcagcgugaugcacgaggcccugcacaaccacuacacccagaagucccugagccucucccccggcaagugaggacuaguuauaagacugacuagcccgaugggccucccaacgggcccuccuccccuccuugcaccgagauuaauaaaaaaaaaaaaaaaaaaaaaaaaaaaaaaaaaaaaaaaaaaaaaaaaaaaaaaaaaaaaaaaaugcaucccccccccccccccccccccccccccccccaaaggcucuuuucagagccaccagaauu

SEQ ID NO: 873 - RNA, 1621 nt, Artificial Sequence
  Ipilimumab backbone Rituximab HC with signale peptide
gggagaaagcuuaccauggagcugggccucagcuggaucuuccuucuggccauuuugaagggggugcagugccaaguccaguuaguugaauccggagguggcgugguacagcccgggagaucucugaggcuaucaugugcugcaaguggauuuaccuucagcuccuacacaaugcacugggugcggcaggccccuggcaaaggucucgagugggucacuuuuauaucuuaugacgggaacaauaaguacuaugcggauucggugaaaggacgcuucacgaucucacgagacaacagcaagaauacccuguaccuucaaaugaacagucugcgugcugaagauacagccauuuauuacugcgcaagaacuggcugguugggcccauuugacuauugggggcagggaacccucguuacaguguccucugccagcaccaaagguccguccgucuucccccuggcuccuucaaguaagagcacuucuggcgggacagcagcccugggaugucucgugaaggauuacuuuccagagcccguaaccguuuccuggaacucaggcgcuuuaacgagcggugugcauacuuucccugccguccugcagaguucugggcuuuacuccuugagcucgguggugaccgucccaucuuccucacugggaacacagacuuauaucugcaauguuaaucacaaacccaguaacaccaagguggacaaaaggguagaaccuaagagcugugauaaaacacauaccugcccaccgugucccgcccccgagcugcugggcggcccgagcguguuccucuucccgcccaagcccaaggacacccugaugaucagccgcacccccgaggucacgugcgugguggucgacgugagccacgaggaccccgaggugaaguucaacugguacgucgacgggguggaggugcacaacgccaagaccaagccccgggaggagcaguacaacagcaccuaccgcgucgugagcgugcugaccguccuccaccaggacuggcugaacggcaaggaguacaagugcaaggugucgaacaaggcccugccggcccccaucgagaagacgaucagcaaggcgaagggucagccuagggaaccccagguguacacguuaccacccucucgggaugagcugaccaagaaccaaguaucacucacaugccuugucaaaggcuucuauccuagugacaucgcaguggaaugggagagcaaugggcagccagagaacaacuacaagacuaccccgcccguucuggacuccgauggaucuuucuucuuguacucgaaacuaacaguggacaagagccgcuggcagcaaggcaaugucuucuccuguucagugaugcacgaagcucugcauaaccacuauacucagaagagucucucucugagcccugguaaaugaggacuaguuauaagacugacuagcccgaugggccucccaacgggcccuccuccccuccuugcaccgagauuaauaaaaaaaaaaaaaaaaaaaaaaaaaaaaaaaaaaaaaaaaaaaaaaaaaaaaaaaaaaaaaaaaugcaucccccccccccccccccccccccccccccccaaaggcucuuuucagagccaccagaauu

SEQ ID NO: 874 - RNA, 1621 nt, Artificial Sequence
  Ipilimumab backbone Rituximab HC with signale peptide
gggagaaagcuuaccauggagcugggccugagcuggaucuuccugcuggccauccugaagggcgugcagugccaggugcagcugguggagagcggcggcggcguggugcagcccggcagaagccugagacugagcugcgccgccagcggcuucaccuucagcagcuacaccaugcacugggugagacaggcccccggcaagggccuggagugggugaccuucaucagcuacgacggcaacaacaaguacuacgccgacagcgugaagggcagauucaccaucagcagagacaacagcaagaacacccuguaccugcagaugaacagccugagagccgaggacaccgccaucuacuacugcgccagaaccggcuggcugggccccuucgacuacuggggccagggcacccuggugaccgugagcagcgccagcaccaagggccccagcguguucccccuggcccccagcagcaagagcaccagcggcggcaccgccgcccugggcugccuggugaaggacuacuuccccgagcccgugaccgugagcuggaacagcggcgcccugaccagcggcgugcacaccuuccccgccgugcugcagagcagcggccuguacagccugagcagcguggugaccgugcccagcagcagccugggcacccagaccuacaucugcaacgugaaccacaagcccagcaacaccaagguggacaagagaguggagcccaagagcugcgacaagacccacaccugcccccccugccccgcccccgagcugcugggcggcccgagcguguuccucuucccgcccaagcccaaggacacccugaugaucagccgcacccccgaggucacgugcgugguggucgacgugagccacgaggaccccgaggugaaguucaacugguacgucgacgggguggaggugcacaacgccaagaccaagccccgggaggagcaguacaacagcaccuaccgcgucgugagcgugcugaccguccuccaccaggacuggcugaacggcaaggaguacaagugcaaggugucgaacaaggcccugccggcccccaucgagaagacgaucagcaaggcgaagggccagcccagagagccccagguguacacccugccccccagcagagacgagcugaccaagaaccaggugagccugaccugccuggugaagggcuucuaccccagcgacaucgccguggagugggagagcaacggccagcccgagaacaacuacaagaccaccccccccgugcuggacagcgacggcagcuucuuccuguacagcaagcugaccguggacaagagcagauggcagcagggcaacguguucagcugcagcgugaugcacgaggcccugcacaaccacuacacccagaagagccugagccugagccccggcaagugaggacuaguuauaagacugacuagcccgaugggccucccaacgggcccuccuccccuccuugcaccgagauuaauaaaaaaaaaaaaaaaaaaaaaaaaaaaaaaaaaaaaaaaaaaaaaaaaaaaaaaaaaaaaaaaaugcaucccccccccccccccccccccccccccccccaaaggcucuuuucagagccaccagaauu

SEQ ID NO: 875 - RNA, 1564 nt, Artificial Sequence
  Ipilimumab HC without signale peptide
gggagaaagcuuacccaggugcagcuggucgagagcggcgggggcguggugcagcccgggcgcucccuccggcugagcugcgccgccuccggcuucaccuucagcuccuacaccaugcacuggguccgccaggcgccggggaagggccuggagugggugacguucaucagcuacgacggcaacaacaaguacuacgccgacuccgugaaggggcgguucaccaucagccgcgacaacuccaagaacacccucuaccugcagaugaacagccugcgggccgaggacaccgccaucuacuacugcgcccgcacgggcuggcucgggcccuucgacuacuggggccaggggacccuggucaccguguccagcgcguccaccaagggccccagcguguucccccuggccccguccagcaaguccacgagcggcgggaccgccgcccucggcugccuggucaaggacuacuuccccgagcccgugaccguguccuggaacagcggggcgcugaccagcggcguccacacguuccccgccgugcuccaguccagcggccuguacucccugagcuccguggucaccgugccgagcuccagccucgggacccagaccuacaucugcaacgugaaccacaagcccuccaacacgaaggucgacaagcggguggagcccaagagcugcgacaagacccacacgugcccgcccugccccgcccccgagcugcugggcgggcccuccguguuccucuucccgcccaagcccaaggacacccugaugaucagccgcacccccgaggugaccugcgucguggucgacgugucccacgaggacccggaggucaaguucaacugguacguggacggcguggagguccacaacgccaagaccaagccccgggaggagcaguacaacagcaccuaccgcgugguguccguccugacggugcuccaccaggacuggcugaacgggaaggaguacaagugcaaggugagcaacaaggcccugcccgcgcccaucgagaagaccaucuccaaggccaagggccagccgcgggagccccaggucuacacccucccgcccagccgcgacgagcugaccaagaaccaggugucccugacgugccucgugaagggcuucuaccccagcgacaucgccgucgagugggagagcaacgggcagcccgagaacaacuacaagaccacgcccccggugcuggacuccgacggcagcuucuuccuguacuccaagcucaccguggacaagagccgguggcagcaggggaacgucuucuccugcagcgugaugcacgaggcccugcacaaccacuacacccagaagucccugagccucucccccggcaagugaggacuaguuauaagacugacuagcccgaugggccucccaacgggcccuccuccccuccuugcaccgagauuaauaaaaaaaaaaaaaaaaaaaaaaaaaaaaaaaaaaaaaaaaaaaaaaaaaaaaaaaaaaaaaaaaugcaucccccccccccccccccccccccccccccccaaaggcucuuuucagagccaccagaauu

SEQ ID NO: 876 - RNA, 1564 nt, Artificial Sequence
  Ipilimumab HC without signale peptide
gggagaaagcuuacccagguccagcucgucgaguccggcggcggcgucguccagcccggccgcucccuccgccucuccugcgccgccuccggcuucaccuucuccuccuacaccaugcacuggguccgccaggcccccggcaagggccucgagugggucaccuucaucuccuacgacggcaacaacaaguacuacgccgacuccgucaagggccgcuucaccaucucccgcgacaacuccaagaacacccucuaccuccagaugaacucccuccgcgccgaggacaccgccaucuacuacugcgcccgcaccggcuggcucggccccuucgacuacuggggccagggcacccucgucaccgucuccuccgccuccaccaagggccccuccgucuucccccucgcccccuccuccaaguccaccuccggcggcaccgccgcccucggcugccucgucaaggacuacuuccccgagcccgucaccgucuccuggaacuccggcgcccucaccuccggcguccacaccuuccccgccguccuccaguccuccggccucuacucccucuccuccgucgucaccguccccuccuccucccucggcacccagaccuacaucugcaacgucaaccacaagcccuccaacaccaaggucgacaagcgcgucgagcccaaguccugcgacaagacccacaccugcccccccugccccgcccccgagcuccucggcggccccuccgucuuccucuucccccccaagcccaaggacacccucaugaucucccgcacccccgaggucaccugcgucgucgucgacgucucccacgaggaccccgaggucaaguucaacugguacgucgacggcgucgagguccacaacgccaagaccaagccccgcgaggagcaguacaacuccaccuaccgcgucgucuccguccucaccguccuccaccaggacuggcucaacggcaaggaguacaagugcaaggucuccaacaaggcccuccccgcccccaucgagaagaccaucuccaaggccaagggccagccccgcgagccccaggucuacacccucccccccucccgcgacgagcucaccaagaaccaggucucccucaccugccucgucaagggcuucuaccccuccgacaucgccgucgagugggaguccaacggccagcccgagaacaacuacaagaccaccccccccguccucgacuccgacggcuccuucuuccucuacuccaagcucaccgucgacaagucccgcuggcagcagggcaacgucuucuccugcuccgucaugcacgaggcccuccacaaccacuacacccagaagucccucucccucucccccggcaagugaggacuaguuauaagacugacuagcccgaugggccucccaacgggcccuccuccccuccuugcaccgagauuaauaaaaaaaaaaaaaaaaaaaaaaaaaaaaaaaaaaaaaaaaaaaaaaaaaaaaaaaaaaaaaaaaugcaucccccccccccccccccccccccccccccccaaaggcucuuuucagagccaccagaauu

SEQ ID NO: 877 - RNA, 1564 nt, Artificial Sequence
  Ipilimumab HC without signale peptide
gggagaaagcuuacccaggugcaacuggucgagagcggcgggggaguugugcagcccgguagaucccucaggcuuucuugcgccgcuucaggcuucaccuuuaguagcuacacaaugcacuggguacggcaggcaccugggaagggacuggaaugggugacuuucaucuccuaugacggcaacaauaaauacuaugccgauucugucaagggucgcuuuacgauuucgcgagacaacagcaaaaauaccuuguacuuacagaugaacucacugcgugcggaggauacagcuauauauuacugugccagaacuggguggcuaggaccauucgacuauuggggccaaggcacccucgugacaguuaguuccgcaucuaccaaggggccgagcguguuuccccuggccccuuccucaaaaaguacuagcggagguacagcugcacuuggcugccuggucaaggauuacuucccagaacccgugaccguaucuuggaacuccggggccuugacgucaggaguucauacuuuuccugcugugcuccagagcaguggccuguacucucuguccagcgucgugaccgugccaucgucuucccucgguacacagacuuauaucuguaaugucaaucacaagcccucaaacaccaaaguugacaagaggguggagccuaaaaguugcgauaagacacauaccuguccaccgugccccgccccugaauuacuugggggaccaagcguauuccuguuucccccuaaaccaaaggacacguugaugauuucccggacucccgaggugacaugugucgugguugaugugucucacgaggacccggaagucaaguucaauugguacguggauggcguagagguucauaacgcgaaaaccaagccucgcgaagaacaguauaauagcacuuacagaguggucucagugcugacaguccuacaccaagacuggcucaacggcaaagaguauaagugcaaagugaguaauaaggcacugcccgccccaaucgagaaaaccauuuccaaggcuaaggggcagccuagggagccccagguuuacacgcuuccacccagccgggaugaacugaccaaaaaccaggugucuuugacaugucucguaaagggauuuuauccuucagacaucgccgucgagugggaaaguaauggucaaccagagaacaacuacaaaacuaccccgcccgugcuggacagcgauggcuccuucuuuuuauacucuaagcugacaguugacaaaucgcgcuggcagcaggggaauguguucagcugcuccgucaugcacgaggcacuccauaaccacuauacucaaaagucacuuagucugucuccuggaaagugaggacuaguuauaagacugacuagcccgaugggccucccaacgggcccuccuccccuccuugcaccgagauuaauaaaaaaaaaaaaaaaaaaaaaaaaaaaaaaaaaaaaaaaaaaaaaaaaaaaaaaaaaaaaaaaaugcaucccccccccccccccccccccccccccccccaaaggcucuuuucagagccaccagaauu

SEQ ID NO: 878 - RNA, 1564 nt, Artificial Sequence
  Ipilimumab HC without signale peptide
gggagaaagcuuacccaggugcagcugguggagagcggcggcggcguggugcagcccggcagaagccugagacugagcugcgccgccagcggcuucaccuucagcagcuacaccaugcacugggugagacaggcccccggcaagggccuggagugggugaccuucaucagcuacgacggcaacaacaaguacuacgccgacagcgugaagggcagauucaccaucagcagagacaacagcaagaacacccuguaccugcagaugaacagccugagagccgaggacaccgccaucuacuacugcgccagaaccggcuggcugggccccuucgacuacuggggccagggcacccuggugaccgugagcagcgccagcaccaagggccccagcguguucccccuggcccccagcagcaagagcaccagcggcggcaccgccgcccugggcugccuggugaaggacuacuuccccgagcccgugaccgugagcuggaacagcggcgcccugaccagcggcgugcacaccuuccccgccgugcugcagagcagcggccuguacagccugagcagcguggugaccgugcccagcagcagccugggcacccagaccuacaucugcaacgugaaccacaagcccagcaacaccaagguggacaagagaguggagcccaagagcugcgacaagacccacaccugcccccccugccccgcccccgagcugcugggcggccccagcguguuccuguucccccccaagcccaaggacacccugaugaucagcagaacccccgaggugaccugcguggugguggacgugagccacgaggaccccgaggugaaguucaacugguacguggacggcguggaggugcacaacgccaagaccaagcccagagaggagcaguacaacagcaccuacagaguggugagcgugcugaccgugcugcaccaggacuggcugaacggcaaggaguacaagugcaaggugagcaacaaggcccugcccgcccccaucgagaagaccaucagcaaggccaagggccagcccagagagccccagguguacacccugccccccagcagagacgagcugaccaagaaccaggugagccugaccugccuggugaagggcuucuaccccagcgacaucgccguggagugggagagcaacggccagcccgagaacaacuacaagaccaccccccccgugcuggacagcgacggcagcuucuuccuguacagcaagcugaccguggacaagagcagauggcagcagggcaacguguucagcugcagcgugaugcacgaggcccugcacaaccacuacacccagaagagccugagccugagccccggcaagugaggacuaguuauaagacugacuagcccgaugggccucccaacgggcccuccuccccuccuugcaccgagauuaauaaaaaaaaaaaaaaaaaaaaaaaaaaaaaaaaaaaaaaaaaaaaaaaaaaaaaaaaaaaaaaaaugcaucccccccccccccccccccccccccccccccaaaggcucuuuucagagccaccagaauu

SEQ ID NO: 879 - RNA, 1564 nt, Artificial Sequence
  Ipilimumab HC without signale peptide
gggagaaagcuuacccaggugcaacuggucgagagcggcgggggaguugugcagcccggcagaucccuccggcugucuugcgccgcuagcggguucaccuuuuccucuuacacaaugcacugggugcgccaggccccuggaaagggccuugaaugggucacguucaucagcuaugacgggaacaauaaauacuaugcggauuccgugaagggaagauuuaccauuucucgggacaacagcaaaaauacacuguaccuccagaugaacucccugcgcgcugaggauaccgccaucuauuacugugccagaacaggcuggcuuggcccguucgacuauugggggcaaggaacccugguuacagugagcucugcuuccaccaagggccccagcgucuuuccucucgcccccucuuccaaaagcacgucugggggaaccgcugcccugggcugccuggugaaggauuacuucccugaacccguuacaguguccuggaauagcggggcgcucaccuccggaguccauacauuuccugccgugcugcagucuagcggccuuuacucccugagcucuguggucaccguuccguccagcucucucggcacgcagacauauauuuguaacgugaaucacaagcccagcaacaccaaaguggacaagcgggucgagccuaaauccugcgauaagacacauaccugucccccuugccccgcuccggaacugcuugggggaccuucuguguuccuguuucccccuaaacccaaggacacccucaugaucagccgcacacccgagguuacguguguggucguggauguuucccacgaggacccugaagugaaguucaauugguacgucgauggcguggagguccauaacgccaaaaccaagccgagagaagaacaguauaauagcacauaccgggugguuucugugcugaccguccugcaccaagacuggcucaacgggaaagaguauaagugcaaaguguccaauaaggcucugcccgccccuauugagaaaacaaucagcaaggcgaagggacagccccgcgagccucagguuuacacccuucccccgucuagagaugaacugacgaaaaaccaggugucccucacaugucuggucaagggcuuuuauccuagcgacaucgccguggagugggaauccaaugggcaacccgagaacaacuacaaaaccaccccucccgugcuugacucugauggcagcuucuuucuguacuccaagcucacaguugacaaaucucgguggcagcagggaaaugucuucagcugcuccgugaugcacgaggcucugcauaaccacuauacccaaaagagccugucucucuccccuggcaagugaggacuaguuauaagacugacuagcccgaugggccucccaacgggcccuccuccccuccuugcaccgagauuaauaaaaaaaaaaaaaaaaaaaaaaaaaaaaaaaaaaaaaaaaaaaaaaaaaaaaaaaaaaaaaaaaugcaucccccccccccccccccccccccccccccccaaaggcucuuuucagagccaccagaauu

SEQ ID NO: 880 - RNA, 1564 nt, Artificial Sequence
  Ipilimumab HC without signale peptide
gggagaaagcuuacccaaguucaacuaguagaaucaggaggaggagucguccaaccaggcagaucacuaagacuaucaugugcagccucuggcuucacauucucuucuuauacaaugcacuggguaagacaagcaccaggaaaaggacuagaauggguaacauucauaucuuacgacggaaauaacaaauauuacgcugauucuguaaaagguagauucacaauuucuagagacaauaguaaaaauacauuauaccuccaaaugaauagucuuagagcagaagauacagcaauauacuauugugcacgaacaggaugguuaggaccauucgauuacuggggucaaggaacauuaguaacaguaucaucugcaucaacaaaagguccuucaguauucccacucgcaccaucaucaaaauccacaucaggaggaacugcagcccucggaugccuagucaaagacuacuucccagaaccaguaaccguaucuuggaacuccggagcauuaacaucuggaguacauacauucccugcaguacuccaaucaucaggacuauacucacuauccuccguaguaaccgucccuucaucaucucuagguacacaaacuuacauaugcaacguaaaucacaaaccaucuaauacaaaaguagacaaaagagucgaaccaaaaucaugcgacaaaacccacacaugccccccaugcccagcacccgaacuacucggaggaccaucaguauuucuauuuccaccaaaaccaaaagauacacuaaugauaucacgaacaccugaaguaaccuguguugucgucgacguaucgcacgaagacccagaaguaaaauuuaauugguacguagacgguguagaaguucacaaugcaaaaacaaaaccaagagaagaacaauacaacucaacauauagaguaguuucugucuuaaccgucuuacaccaagauugguuaaacgguaaagaauauaaaugcaaaguaucuaauaaagcucuacccgccccaaucgaaaaaacaauaucaaaagccaaaggccaaccucgagaaccacaaguauacacacuacccccuucaagagaugaacuaacaaaaaaccaaguaagccuaacaugccuaguaaaaggcuuuuauccaucagacauagcaguagaaugggaaucuaacggucaaccugaaaauaacuauaaaacaacaccaccaguacuagacucagauggaucauucuuucuauacucaaaauuaacaguagauaaaucaagauggcaacaaggaaacguuuuuucuuguucuguaaugcacgaagcacuacacaaucacuauacccaaaaaucucucagccuaucacccggaaaaugaggacuaguuauaagacugacuagcccgaugggccucccaacgggcccuccuccccuccuugcaccgagauuaauaaaaaaaaaaaaaaaaaaaaaaaaaaaaaaaaaaaaaaaaaaaaaaaaaaaaaaaaaaaaaaaaugcaucccccccccccccccccccccccccccccccaaaggcucuuuucagagccaccagaauu

SEQ ID NO: 881 - RNA, 1564 nt, Artificial Sequence
  Ipilimumab HC without signale peptide
gggagaaagcuuacccaggugcaacuggucgagagcggcgggggugugguacagcccggcaggucccuccggcugaguugcgccgcaagcggguucaccuuuuccaguuacacuaugcacugggugcgccaggccccaggcaaggguuuggaaugggucaccuucaucagcuaugacgggaacaauaaauacuaugcggauuccgugaagggcagguuuacgauuagccgggacaacuccaaaaauacucuguaccuccagaugaacagucugcgcgccgaggauaccgcaaucuauuacugugccaggaccggcugguuggggccguucgacuauuggggucaaggcacucuggugaccgucagcuccgcaagcacgaaggggcccaguguguuuccacucgcccccuccagcaaauccaccaguggcgguaccgcggcccuggggugccugguaaaggauuacuucccagaacccgugacugucagcuggaacuccggcgcacucaccagcggcgugcauaccuuuccagccgugcugcagaguuccggguuguacagccugaguuccgucgugacgguaccgagcagcucccucgguacucagaccuauauuuguaaugugaaucacaagcccaguaacacuaaagucgacaagcggguggagccaaaaagcugcgauaagacccauaccugucccccaugccccgccccggaacugcugggcgggcccuccguguucuuguuuccacccaaaccaaaggacacucucaugaucagccgcacgcccgaggucaccugugugguaguggaugucagucacgaggacccagaagugaaauucaauugguacgucgauggcguggaggugcauaacgcaaagacuaagccgagggaagaacaguauaauuccaccuaccggguagugagcguccugaccgugcugcaccaagacuggcucaacgguaaagaguauaagugcaaagucuccaauaaggcccugcccgcgccaauugagaaaacuaucaguaaggccaagggccagccccgcgagccacagguguacacguugcccccgagcagggaugaacugaccaaaaaccaggugucccucacuugucugguaaagggguuuuauccaagcgacaucgcaguggagugggaaaguaauggccaacccgagaacaacuacaaaaccacucccccaguccuggacuccgaugggagcuucuucuuguacuccaagcucacuguggacaaaagucgguggcagcaggguaaugucuuuagcugcuccgugaugcacgaggcccugcauaaccacuauacgcaaaagagccugagucucucccccggcaagugaggacuaguuauaagacugacuagcccgaugggccucccaacgggcccuccuccccuccuugcaccgagauuaauaaaaaaaaaaaaaaaaaaaaaaaaaaaaaaaaaaaaaaaaaaaaaaaaaaaaaaaaaaaaaaaaugcaucccccccccccccccccccccccccccccccaaaggcucuuuucagagccaccagaauu

SEQ ID NO: 882 - RNA, 1564 nt, Artificial Sequence
  Ipilimumab HC without signale peptide
gggagaaagcuuacccaaguccagcuaguagaauccggcggaggcgucguccaaccaggacgcucgcuaagacucagcugcgccgcaucuggcuucacauucagcucauacacaaugcacugggucagacaagcuccaggcaaaggccucgaaugggucacauucauaucauacgacggcaacaacaaauacuacgccgacuccguaaaaggccgcuucaccaucuccagagacaacuccaaaaacacccuauaccuccaaaugaacucacucagagccgaagacaccgcaaucuacuacugcgcaagaaccggcuggcuuggccccuucgauuacuggggacaaggcacccucgucaccgucucauccgcauccaccaaaggcccauccgucuucccccucgcaccaucauccaaauccaccagcggagguaccgccgcacucggcugccuagucaaagacuacuuccccgaaccugucacagucuccuggaacuccggagcccugacaucgggcguccacacauuccccgccguccuacaaagcuccggccucuacagccucuccucagucgucaccguacccuccuccagccucggaacacaaaccuacaucugcaacguuaaccacaaaccuuccaacaccaaagucgacaaacgagucgaacccaaaucgugcgacaaaacccauaccugcccacccugccccgcccccgaacuccucggcggcccauccgucuuccuauucccacccaaaccaaaggacacacucaugauaucacgaaccccugaagucacgugcgucgucgucgacguuucacacgaagaccccgaagucaaauucaacugguacguagacggagucgaaguccacaacgccaaaaccaaaccccgagaagaacaauacaacucuaccuaccgcgucguauccguccucaccguccuccaccaagacuggcuaaacggcaaagaauacaagugcaaaguuucgaacaaagcccuccccgcacccaucgagaaaaccaucuccaaagccaaaggacaaccccgcgaaccccaaguguacacccucccacccucgcgugacgaacucaccaaaaaucaagucucucuaaccugccucguaaaaggcuucuaccccuccgacauagcaguagaaugggaaucuaacggccagcccgaaaacaacuacaaaacaaccccacccguacucgacuccgacggcucauucuuccucuacucaaaacucaccgucgauaaaucccgcuggcaacaaggcaaugucuucucaugcagcgucaugcacgaagcacuccacaaccacuacacacaaaagagccucucccuaucccccggcaaaugaggacuaguuauaagacugacuagcccgaugggccucccaacgggcccuccuccccuccuugcaccgagauuaauaaaaaaaaaaaaaaaaaaaaaaaaaaaaaaaaaaaaaaaaaaaaaaaaaaaaaaaaaaaaaaaaugcaucccccccccccccccccccccccccccccccaaaggcucuuuucagagccaccagaauu

SEQ ID NO: 883 - RNA, 1564 nt, Artificial Sequence
  Ipilimumab HC without signale peptide
gggagaaagcuuacccaaguccagcuagucgaaucaggcggaggcgucguccaacccggacggucccuacgacucagcugugcugccagcggcuucaccuucucguccuacacaaugcacuggguccggcaagcacccggcaaaggucucgaaugggucaccuucauauccuaugacggcaacaacaaauacuacgccgacuccgucaaaggccgcuucacaaucucaagagacaacuccaaaaacacccucuaccuccaaaugaacucgcuaagagcagaagacaccgccaucuacuacugcgcccgcaccggauggcucggccccuucgacuacuggggccaaggcacccuagucacaguaucauccgccucuacaaagggaccauccgucuucccccucgccccauccuccaaauccaccucuggaggcaccgccgcacucggaugccucgucaaagacuacuuccccgaacccgucacagucuccuggaacuccggcgcccuaaccuccggaguccacacauucccugcuguccuacaauccucgggccuauacucccucucaucuguagucaccguccccucauccucccuuggaacccaaacguacauaugcaacgucaaccacaaaccuuccaacacaaaagucgacaaacguguagagccaaaguccugugacaaaacacacacaugcccaccaugucccgcgcccgaacuacucggcggacccucagucuuccucuuucccccgaaacccaaagacacccucaugauaucacgcacccccgaaguuaccugcgucgucgucgacgucucccacgaagaccccgaagucaaauucaacugguacgucgacggcguagaaguccacaacgccaaaaccaaaccacgggaagaacaauacaacuccacauaccgcgucgucagcguacucaccguccuacaucaagacuggcuaaacggcaaagaauacaaaugcaaaguauccaacaaagcacucccagcaccaaucgagaaaacaaucucaaaagcaaaaggccaaccccgggaaccacaaguauauacccucccacccagcagagacgaacucaccaaaaaccaaguuucacucacaugccucguaaaaggauucuaccccucugacauugcugucgaaugggaauccaacggacaacccgaaaacaacuacaaaaccaccccgcccguccucgacuccgacggcucauucuuccuauacuccaaacucaccguagacaaaucccgauggcagcaaggcaacgucuucuccugcagcguaaugcacgaagcacuccacaaccacuauacccaaaaaucccucucccugucccccggaaaguaaggacuaguuauaagacugacuagcccgaugggccucccaacgggcccuccuccccuccuugcaccgagauuaauaaaaaaaaaaaaaaaaaaaaaaaaaaaaaaaaaaaaaaaaaaaaaaaaaaaaaaaaaaaaaaaaugcaucccccccccccccccccccccccccccccccaaaggcucuuuucagagccaccagaauu

SEQ ID NO: 884 - RNA, 1564 nt, Artificial Sequence
  Ipilimumab HC without signale peptide
gggagaaagcuuacccaaguacaacucgucgaauccggcggcggcguaguccaaccaggcagaucccuacgccucuccugcgccgcauccggauucaccuucuccuccuacaccaugcacuggguacgccaagcccccggcaagggccucgaaugggucacguucaucucuuacgacggcaacaacaaauacuacgccgacuccguaaaaggucguuucaccaucucccgcgacaacagcaaaaacacccuauaccuucaaaugaacucccuccgcgccgaagacaccgccaucuacuacugugcccgcaccgguuggcucggccccuucgacuacuggggucaaggaacccuaguuaccguaucauccgcaucuaccaaaggccccuccguauucccacuagccccaucguccaaaucaacaucaggcggcacagccgcccucggaugccuagucaaagacuacuuccccgaacccgucaccgucucauggaacuccggagcccuaaccucgggaguccacaccuucccagcgguacuacaaucauccggacuuuacucccuaucauccgucgucacaguaccauccucaucccucgggacccaaaccuacauaugcaacgucaaccacaaaccauccaacaccaaagucgacaaaagagucgaaccaaaauccugcgacaaaacccacacaugcccacccugcccagcccccgaacuccucggcggccccuccguauuccucuucccacccaaacccaaggacacccucaugauaucccgcaccccagaaguaaccugcguaguagucgacguuucacacgaagaccccgaagucaaauucaacugguacguagacggcgucgagguccacaacgccaaaaccaaaccucgcgaagaacaauacaacagcacauaccgcgucgucuccguccuaaccguacuacaccaagacuggcuaaacggcaaagaauacaagugcaaagucuccaacaaagcccuccccgcccccaucgagaaaaccauauccaaagccaaaggucaaccccgcgaaccccaaguauacacccuacccccaucccgcgacgagcucaccaaaaaccaaguaucccuaaccugccucgucaaaggcuucuaccccuccgacauagccgucgaaugggaaagcaauggccagcccgaaaacaacuacaaaacaaccccacccguccucgacuccgacggcucuuucuuccucuacucaaaacucacagucgacaaaucacgauggcaacaaggcaacgucuucuccugcagcguaaugcacgaagcccuccacaaccacuacacccaaaaaucacucagccuaagccccggcaaguaaggacuaguuauaagacugacuagcccgaugggccucccaacgggcccuccuccccuccuugcaccgagauuaauaaaaaaaaaaaaaaaaaaaaaaaaaaaaaaaaaaaaaaaaaaaaaaaaaaaaaaaaaaaaaaaaugcaucccccccccccccccccccccccccccccccaaaggcucuuuucagagccaccagaauu

SEQ ID NO: 885 - RNA, 1564 nt, Artificial Sequence
  Ipilimumab HC without signale peptide
gggagaaagcuuacccaaguccaacuagucgaaucaggaggaggcguaguacaaccaggaagauccuuaagacuuucaugugcagcaucuggauuuaccuucucaucauacacaaugcacugggucagacaagcccccggaaaaggacuagaauggguaacauuuauaucauaugauggaaauaacaaauauuacgcagauucuguaaaaggaagauucaccaucucaagagauaauucaaaaaacacacuauaccuacaaaugaacucacucagagcugaagacaccgcaauauacuauugcgcaagaacaggaugguuaggaccuuucgauuacuggggacaaggaacacuaguuaccgucuccuccgcaaguaccaaaggaccaucuguauucccauuagcaccaucauccaaaucaacaucaggaggaaccgcagcauuaggaugcuuaguaaaagacuacuuuccugaacccguaacaguaucauggaauuccggagcacuaacaucaggaguacauaccuuuccagcaguacuccaaucaucaggauuauauuccuuaucuucaguaguaacagucccaucaucuucacuagguacacaaaccuacaucugcaauguaaaccacaaaccaucaaauacaaaagucgacaaaagaguugaaccaaaaucaugugacaaaacucacacaugcccaccauguccagccccagaauuacuaggaggaccaucaguauuccuuuucccaccaaaaccaaaagauacucuaaugauaucccguaccccagaaguaacaugcgucguaguagacguaucacacgaagaccccgaaguaaaauucaauugguacgucgacggaguagaaguacacaacgccaaaacaaaaccccgagaagaacaauacaacuccacauaccguguaguaucaguauuaacagucuuacaccaagacuggcuaaacggaaaagaauacaaauguaaaguuuccaacaaagcacucccagccccuaucgaaaaaaccauaucaaaagcaaaaggccaacccagagaaccccaaguuuauacacuaccaccaucaagagacgaauuaacaaaaaaccaaguaucccuaacaugccuaguaaaaggauucuacccuucagacaucgcaguagaaugggaauccaacggacaaccugaaaacaacuauaaaacaacaccaccaguauuagauagcgauggaucuuucuucuuauauucaaaacuuacaguagacaaaucucgauggcaacaaggaaacguauucucaugcuccguaaugcacgaagcgcuacauaaccauuacacacaaaaaucacuaucauuaucaccaggaaaauaaggacuaguuauaagacugacuagcccgaugggccucccaacgggcccuccuccccuccuugcaccgagauuaauaaaaaaaaaaaaaaaaaaaaaaaaaaaaaaaaaaaaaaaaaaaaaaaaaaaaaaaaaaaaaaaaugcaucccccccccccccccccccccccccccccccaaaggcucuuuucagagccaccagaauu

SEQ ID NO: 886 - RNA, 1564 nt, Artificial Sequence
  Ipilimumab HC without signale peptide
gggagaaagcuuacccaaguucaauuaguagaaucuggaggaggaguaguccaaccaggacguucacuaagacucucuugugcagcuucaggauuuacguucucaagcuauaccaugcacuggguaagacaagccccaggaaaaggauuagaauggguaacauuuauaucuuacgacggcaauaacaaauauuaugcagacucaguuaaagguagauucacaauaagccgagacaauucaaaaaacacucuauaucuacaaaugaauagccuaagagcagaagauacagcaauauauuacugugcacguacaggaugguuagguccuuucgauuacuggggacaagguacucuaguuacaguaagcagcgcaucuaccaaaggaccaagcguauucccucuugcuccaucaagcaaauccacaucaggcggaacagcugcauuaggaugcuuaguaaaagacuauuucccagaacccguaacgguaucuuggaacagcggcgcauuaacaucaggaguacauacuuuuccugcaguacuacaaagcuccggauuauacucuuuaucaucaguaguaacaguaccauccucaucacuaggaacacaaacauauauauguaacguaaaucauaaaccaucaaacaccaaaguagacaaaagaguagaaccaaaaucaugugauaaaacucacaccuguccuccauguccagcacccgaauuauuaggagguccaaguguauucuuauuuccaccaaaaccuaaagauacccuaaugauaucaagaacaccagaaguaacauguguaguaguagacgucucacacgaagacccagaaguaaaauucaacugguacguagacggaguagaaguacauaacgcuaaaacuaaaccacgagaagaacaauacaauaguacauacagaguagugucaguauuaacaguauuacaccaagacuggcuaaauggaaaagaauacaaauguaaaguaucaaauaaagcacuaccagcaccaaucgaaaaaaccaucuccaaagccaaaggacaaccccgugaaccucaagucuauacccuaccacccucaagagacgaacuuacaaaaaaccaaguaagcuuaacaugucuaguaaaaggauucuauccauccgacauagcaguagaaugggaaucaaauggucaaccagaaaacaacuacaaaacaacaccaccaguucucgauucagauggaucauuuuuucuauauagcaaauuaacuguagacaaaucuagauggcaacaaggaaauguauucucauguucaguaaugcaugaagcacuccacaaucauuacacacaaaaaaguuuaaguuuauccccaggcaaauaaggacuaguuauaagacugacuagcccgaugggccucccaacgggcccuccuccccuccuugcaccgagauuaauaaaaaaaaaaaaaaaaaaaaaaaaaaaaaaaaaaaaaaaaaaaaaaaaaaaaaaaaaaaaaaaaugcaucccccccccccccccccccccccccccccccaaaggcucuuuucagagccaccagaauu

SEQ ID NO: 887 - RNA, 1564 nt, Artificial Sequence
  Ipilimumab backbone Rituximab HC without signale peptide
gggagaaagcuuacccaggugcagcuggucgagagcggcgggggcguggugcagcccgggcgcucccuccggcugagcugcgccgccuccggcuucaccuucagcuccuacaccaugcacuggguccgccaggcgccggggaagggccuggagugggugacguucaucagcuacgacggcaacaacaaguacuacgccgacuccgugaaggggcgguucaccaucagccgcgacaacuccaagaacacccucuaccugcagaugaacagccugcgggccgaggacaccgccaucuacuacugcgcccgcacgggcuggcucgggcccuucgacuacuggggccaggggacccuggucaccguguccagcgcguccaccaagggccccagcguguucccccuggccccguccagcaaguccacgagcggcgggaccgccgcccucggcugccuggucaaggacuacuuccccgagcccgugaccguguccuggaacagcggggcgcugaccagcggcguccacacguuccccgccgugcuccaguccagcggccuguacucccugagcuccguggucaccgugccgagcuccagccucgggacccagaccuacaucugcaacgugaaccacaagcccuccaacacgaaggucgacaagcggguggagcccaagagcugcgacaagacccacacgugcccgcccugccccgcccccgagcugcugggcggcccgagcguguuccucuucccgcccaagcccaaggacacccugaugaucagccgcacccccgaggucacgugcgugguggucgacgugagccacgaggaccccgaggugaaguucaacugguacgucgacgggguggaggugcacaacgccaagaccaagccccgggaggagcaguacaacagcaccuaccgcgucgugagcgugcugaccguccuccaccaggacuggcugaacggcaaggaguacaagugcaaggugucgaacaaggcccugccggcccccaucgagaagacgaucagcaaggcgaagggccagccgcgggagccccaggucuacacccucccgcccagccgcgacgagcugaccaagaaccaggugucccugacgugccucgugaagggcuucuaccccagcgacaucgccgucgagugggagagcaacgggcagcccgagaacaacuacaagaccacgcccccggugcuggacuccgacggcagcuucuuccuguacuccaagcucaccguggacaagagccgguggcagcaggggaacgucuucuccugcagcgugaugcacgaggcccugcacaaccacuacacccagaagucccugagccucucccccggcaagugaggacuaguuauaagacugacuagcccgaugggccucccaacgggcccuccuccccuccuugcaccgagauuaauaaaaaaaaaaaaaaaaaaaaaaaaaaaaaaaaaaaaaaaaaaaaaaaaaaaaaaaaaaaaaaaaugcaucccccccccccccccccccccccccccccccaaaggcucuuuucagagccaccagaauu

SEQ ID NO: 888 - RNA, 1564 nt, Artificial Sequence
  Ipilimumab backbone Rituximab HC without signale peptide
gggagaaagcuuacccaggugcaacuggucgagagcggcgggggaguugugcagcccgguagaucccucaggcuuucuugcgccgcuucaggcuucaccuuuaguagcuacacaaugcacuggguacggcaggcaccugggaagggacuggaaugggugacuuucaucuccuaugacggcaacaauaaauacuaugccgauucugucaagggucgcuuuacgauuucgcgagacaacagcaaaaauaccuuguacuuacagaugaacucacugcgugcggaggauacagcuauauauuacugugccagaacuggguggcuaggaccauucgacuauuggggccaaggcacccucgugacaguuaguuccgcaucuaccaaggggccgagcguguuuccccuggccccuuccucaaaaaguacuagcggagguacagcugcacuuggcugccuggucaaggauuacuucccagaacccgugaccguaucuuggaacuccggggccuugacgucaggaguucauacuuuuccugcugugcuccagagcaguggccuguacucucuguccagcgucgugaccgugccaucgucuucccucgguacacagacuuauaucuguaaugucaaucacaagcccucaaacaccaaaguugacaagaggguggagccuaaaaguugcgauaagacacauaccuguccaccgugccccgcccccgagcugcugggcggcccgagcguguuccucuucccgcccaagcccaaggacacccugaugaucagccgcacccccgaggucacgugcgugguggucgacgugagccacgaggaccccgaggugaaguucaacugguacgucgacgggguggaggugcacaacgccaagaccaagccccgggaggagcaguacaacagcaccuaccgcgucgugagcgugcugaccguccuccaccaggacuggcugaacggcaaggaguacaagugcaaggugucgaacaaggcccugccggcccccaucgagaagacgaucagcaaggcgaaggggcagccuagggagccccagguuuacacgcuuccacccagccgggaugaacugaccaaaaaccaggugucuuugacaugucucguaaagggauuuuauccuucagacaucgccgucgagugggaaaguaauggucaaccagagaacaacuacaaaacuaccccgcccgugcuggacagcgauggcuccuucuuuuuauacucuaagcugacaguugacaaaucgcgcuggcagcaggggaauguguucagcugcuccgucaugcacgaggcacuccauaaccacuauacucaaaagucacuuagucugucuccuggaaagugaggacuaguuauaagacugacuagcccgaugggccucccaacgggcccuccuccccuccuugcaccgagauuaauaaaaaaaaaaaaaaaaaaaaaaaaaaaaaaaaaaaaaaaaaaaaaaaaaaaaaaaaaaaaaaaaugcaucccccccccccccccccccccccccccccccaaaggcucuuuucagagccaccagaauu

SEQ ID NO: 889 - RNA, 1564 nt, Artificial Sequence
  Ipilimumab backbone Rituximab HC without signale peptide
gggagaaagcuuacccaggugcagcugguggagagcggcggcggcguggugcagcccggcagaagccugagacugagcugcgccgccagcggcuucaccuucagcagcuacaccaugcacugggugagacaggcccccggcaagggccuggagugggugaccuucaucagcuacgacggcaacaacaaguacuacgccgacagcgugaagggcagauucaccaucagcagagacaacagcaagaacacccuguaccugcagaugaacagccugagagccgaggacaccgccaucuacuacugcgccagaaccggcuggcugggccccuucgacuacuggggccagggcacccuggugaccgugagcagcgccagcaccaagggccccagcguguucccccuggcccccagcagcaagagcaccagcggcggcaccgccgcccugggcugccuggugaaggacuacuuccccgagcccgugaccgugagcuggaacagcggcgcccugaccagcggcgugcacaccuuccccgccgugcugcagagcagcggccuguacagccugagcagcguggugaccgugcccagcagcagccugggcacccagaccuacaucugcaacgugaaccacaagcccagcaacaccaagguggacaagagaguggagcccaagagcugcgacaagacccacaccugcccccccugccccgcccccgagcugcugggcggcccgagcguguuccucuucccgcccaagcccaaggacacccugaugaucagccgcacccccgaggucacgugcgugguggucgacgugagccacgaggaccccgaggugaaguucaacugguacgucgacgggguggaggugcacaacgccaagaccaagccccgggaggagcaguacaacagcaccuaccgcgucgugagcgugcugaccguccuccaccaggacuggcugaacggcaaggaguacaagugcaaggugucgaacaaggcccugccggcccccaucgagaagacgaucagcaaggcgaagggccagcccagagagccccagguguacacccugccccccagcagagacgagcugaccaagaaccaggugagccugaccugccuggugaagggcuucuaccccagcgacaucgccguggagugggagagcaacggccagcccgagaacaacuacaagaccaccccccccgugcuggacagcgacggcagcuucuuccuguacagcaagcugaccguggacaagagcagauggcagcagggcaacguguucagcugcagcgugaugcacgaggcccugcacaaccacuacacccagaagagccugagccugagccccggcaagugaggacuaguuauaagacugacuagcccgaugggccucccaacgggcccuccuccccuccuugcaccgagauuaauaaaaaaaaaaaaaaaaaaaaaaaaaaaaaaaaaaaaaaaaaaaaaaaaaaaaaaaaaaaaaaaaugcaucccccccccccccccccccccccccccccccaaaggcucuuuucagagccaccagaauu

SEQ ID NO: 890 - RNA, 925 nt, Artificial Sequence; identical to SEQ ID NO: 595
  Ipilimumab LC with signale peptide

SEQ ID NO: 891 - RNA, 925 nt, Artificial Sequence
  Ipilimumab LC with signale peptide
gggagaaagcuuaccauggagacccccgcccagcuccucuuccuccuccuccucuggcuccccgacaccaccggcgagaucguccucacccagucccccggcacccucucccucucccccggcgagcgcgccacccucuccugccgcgccucccaguccgucggcuccuccuaccucgccugguaccagcagaagcccggccaggccccccgccuccucaucuacggcgccuucucccgcgccaccggcauccccgaccgcuucuccggcuccggcuccggcaccgacuucacccucaccaucucccgccucgagcccgaggacuucgccgucuacuacugccagcaguacggcuccucccccuggaccuucggccagggcaccaaggucgagaucaagcgcaccgucgccgcccccuccgucuucaucuucccccccuccgacgagcagcucaaguccggcaccgccuccgucgucugccuccucaacaacuucuacccccgcgaggccaagguccaguggaaggucgacaacgcccuccaguccggcaacucccaggaguccgucaccgagcaggacuccaaggacuccaccuacucccucuccuccacccucacccucuccaaggccgacuacgagaagcacaaggucuacgccugcgaggucacccaccagggccucuccucccccgucaccaaguccuucaaccgcggcgagugcugaggacuaguuauaagacugacuagcccgaugggccucccaacgggcccuccuccccuccuugcaccgagauuaauaaaaaaaaaaaaaaaaaaaaaaaaaaaaaaaaaaaaaaaaaaaaaaaaaaaaaaaaaaaaaaaaugcaucccccccccccccccccccccccccccccccaaaggcucuuuucagagccaccagaauu

SEQ ID NO: 892 - RNA, 925 nt, Artificial Sequence
  Ipilimumab LC with signale peptide
gggagaaagcuuaccauggagacccccgcccagcuucucuuccuucuguuguuauggcugccugacacaacuggcgaaaucgugcuaacgcaaagcccagggacccucucccugucuccgggagagagagcuacacuuucaugcagggcaagucagagcgucgguuccucuuaccuggccugguaucagcagaagcccggccaagcgccucgguugcucauuuacggggcuuuuucgcgcgccacuggaauaccagaucgauucucaggcagcgguagugggaccgacuuuacacugaccaucucccgucuggaacccgaggauuucgcaguuuauuacugucagcaguauggaucuagcccuuggacuuuuggccagggcacaaaaguggaaauuaagagaaccguagccgcuccauccguguucaucuuucccccuucagacgagcaacucaaaagugggacggcaagcgucgugugcuuacugaacaauuucuacccaagggaggccaagguucaguggaaaguggauaacgcucugcagucuggaaauucccaggaaucagucacugagcaagacagcaaggauaguaccuauucuuuguccagcacacugacucuaucgaaggccgacuacgaaaaacacaagguguacgcgugugagguaacccaucagggucucucuuccccgguuacaaaaucauuuaaccggggcgagugcugaggacuaguuauaagacugacuagcccgaugggccucccaacgggcccuccuccccuccuugcaccgagauuaauaaaaaaaaaaaaaaaaaaaaaaaaaaaaaaaaaaaaaaaaaaaaaaaaaaaaaaaaaaaaaaaaugcaucccccccccccccccccccccccccccccccaaaggcucuuuucagagccaccagaauu

SEQ ID NO: 893 - RNA, 925 nt, Artificial Sequence
  Ipilimumab LC with signale peptide
gggagaaagcuuaccauggagacccccgcccagcugcuguuccugcugcugcuguggcugcccgacaccaccggcgagaucgugcugacccagagccccggcacccugagccugagccccggcgagagagccacccugagcugcagagccagccagagcgugggcagcagcuaccuggccugguaccagcagaagcccggccaggcccccagacugcugaucuacggcgccuucagcagagccaccggcauccccgacagauucagcggcagcggcagcggcaccgacuucacccugaccaucagcagacuggagcccgaggacuucgccguguacuacugccagcaguacggcagcagccccuggaccuucggccagggcaccaagguggagaucaagagaaccguggccgcccccagcguguucaucuucccccccagcgacgagcagcugaagagcggcaccgccagcguggugugccugcugaacaacuucuaccccagagaggccaaggugcaguggaagguggacaacgcccugcagagcggcaacagccaggagagcgugaccgagcaggacagcaaggacagcaccuacagccugagcagcacccugacccugagcaaggccgacuacgagaagcacaagguguacgccugcgaggugacccaccagggccugagcagccccgugaccaagagcuucaacagaggcgagugcugaggacuaguuauaagacugacuagcccgaugggccucccaacgggcccuccuccccuccuugcaccgagauuaauaaaaaaaaaaaaaaaaaaaaaaaaaaaaaaaaaaaaaaaaaaaaaaaaaaaaaaaaaaaaaaaaugcaucccccccccccccccccccccccccccccccaaaggcucuuuucagagccaccagaauu

SEQ ID NO: 894 - RNA, 925 nt, Artificial Sequence
  Ipilimumab LC with signale peptide
gggagaaagcuuaccauggagacccccgcccagcuccuguuccugcuucugcucuggcugccugacacaacgggcgaaaucgugcuuacccaaagcccggggacacugucccucucucccggagagagagcuacccugagcugccgggccucccagucugucggcagcuccuaccuggcgugguaucagcagaaaccugggcaagcuccccgccuccugauuuacggagccuuuucuagagccacaggcaucccugaucgguucagcggguccggaagcggcaccgacuuuacacuuaccauuucucgccuggaacccgaggauuucgcuguuuauuacugucagcaguauggcuccagcccuuggacguuugggcagggaaccaaaguggaaaucaagagaacaguggccgcuccgucugucuucauuuuucccccuuccgacgagcaacucaaaagcggcaccgccucugugguuugccugcuuaacaauuucuacccccgggaggcgaaggugcaguggaaagucgauaacgcccugcaguccgggaauagccaggaauccgugacagagcaagacucuaaggauagcaccuauucccucagcucuacgcugacacuguccaaggcugacuacgaaaaacacaagguuuacgccugugaggugacccaucagggacucagcucuccugucacaaagagcuuuaaccgcggcgagugcugaggacuaguuauaagacugacuagcccgaugggccucccaacgggcccuccuccccuccuugcaccgagauuaauaaaaaaaaaaaaaaaaaaaaaaaaaaaaaaaaaaaaaaaaaaaaaaaaaaaaaaaaaaaaaaaaugcaucccccccccccccccccccccccccccccccaaaggcucuuuucagagccaccagaauu

SEQ ID NO: 895 - RNA, 925 nt, Artificial Sequence
  Ipilimumab LC with signale peptide
gggagaaagcuuaccauggaaacaccagcacaacuacuauucuuacuauuacuauggcuaccagacacaacaggagaaauaguacuaacacaaucaccaggaacacuaagucuaucaccaggagaaagagcaacacuaucaugcagagcaucccaaucaguuggaucuuccuaccuagccugguaucaacaaaaaccaggacaagcaccaagauuacuaauauacggagcauucucaagagcaacuggaaucccagauagauucucaggaucaggaucaggaacagacuucacauuaacaauaucacgacuagaaccagaagacuucgcaguauacuacugucaacaauacggauccucaccauggaccuucggccaaggaacaaaaguagaaauaaaaagaacaguagcagccccaucuguauucauauucccaccaucagaugaacaacuaaaaucaggaacagcaucaguaguaugcuuacuaaacaacuucuacccaagagaagccaaaguacaauggaaaguagacaacgcacuacaaucaggaaauucccaagaaucaguaacagaacaagacucaaaagacuccacauacucauuaucaucaacauuaacacuaucaaaagcagacuacgaaaaacacaaaguauacgcaugugaaguaacacaccaaggacuaucaucaccaguaacaaaaucauucaaccgaggagaaugcugaggacuaguuauaagacugacuagcccgaugggccucccaacgggcccuccuccccuccuugcaccgagauuaauaaaaaaaaaaaaaaaaaaaaaaaaaaaaaaaaaaaaaaaaaaaaaaaaaaaaaaaaaaaaaaaaugcaucccccccccccccccccccccccccccccccaaaggcucuuuucagagccaccagaauu

SEQ ID NO: 896 - RNA, 925 nt, Artificial Sequence
  Ipilimumab LC with signale peptide
gggagaaagcuuaccauggagacccccgcccagcuccuguuccuguugcugcucuggcugccagacacuaccggcgaaaucguguugacgcaaagcccggggacucugucccucagucccggugagagggcaacccugagcugccgggccucccagagugucggcagcuccuaccuggcgugguaucagcagaagccagggcaagcaccccgccuccugauuuacggcgccuuuagcagggccaccgguaucccagaucgguucuccgggaguggcagcggcacugacuuuaccuugacgauuucccgccuggaacccgaggauuucgcaguguauuacugucagcaguaugggagcaguccauggacuuuuggucagggcaccaaaguagaaaucaagaggacuguggccgcgccguccgucuucauuuuucccccaagcgacgagcaacucaaauccgggaccgccaguguggugugccugcugaacaauuucuacccccgggaggcaaagguccaguggaaaguggauaacgccuugcagagcggcaauucccaggaaagcguaaccgagcaagacaguaaggauuccacguauagccucaguuccacucugacccugagcaaggccgacuacgaaaaacacaagguguacgcaugugaggucacucaucagggucucagcuccccagugaccaaaaguuuuaaccgcggggagugcugaggacuaguuauaagacugacuagcccgaugggccucccaacgggcccuccuccccuccuugcaccgagauuaauaaaaaaaaaaaaaaaaaaaaaaaaaaaaaaaaaaaaaaaaaaaaaaaaaaaaaaaaaaaaaaaaugcaucccccccccccccccccccccccccccccccaaaggcucuuuucagagccaccagaauu

SEQ ID NO: 897 - RNA, 925 nt, Artificial Sequence
  Ipilimumab LC with signale peptide
gggagaaagcuuaccauggaaacccccgcccaacuccucuuccuauuacuccucuggcuacccgacaccaccggcgaaaucguccucacccaauccccaggcacccucucucucucccccggagaacgcgcaacacucuccugccgugcaucccaauccgucggaucuuccuaccucgccugguaccaacaaaaacccggccaagccccacgccuccucaucuacggcgccuucucccgcgccaccggcauuccagaccguuucucaggauccggcuccggcaccgauuucacacucaccaucucccgccuagaaccagaagacuucgccguauacuacugccagcaauacggaucuucccccuggacauucggccaaggcaccaaagucgaaaucaaacgcaccgucgcagcccccuccgucuucaucuucccacccuccgacgaacaacuaaaaucuggcacagcauccgucgucugccuccuaaacaacuucuacccccgcgaagccaaaguccaauggaaagucgacaacgcacuccaaucuggcaacucacaagaauccgucacagaacaagacuccaaagacucaaccuacucccucuccucaacccucacccucuccaaagccgacuacgaaaaacacaaggucuacgcaugcgaagucacccaucaaggacucuccucccccgucaccaaauccuucaaccgcggcgaaugcuaaggacuaguuauaagacugacuagcccgaugggccucccaacgggcccuccuccccuccuugcaccgagauuaauaaaaaaaaaaaaaaaaaaaaaaaaaaaaaaaaaaaaaaaaaaaaaaaaaaaaaaaaaaaaaaaaugcaucccccccccccccccccccccccccccccccaaaggcucuuuucagagccaccagaauu

SEQ ID NO: 898 - RNA, 925 nt, Artificial Sequence
  Ipilimumab LC with signale peptide
gggagaaagcuuaccauggaaacacccgcccaacuccucuuccuccuccuccucuggcuacccgacaccaccggcgaaaucguccucacccaaucccccggcacccuaucccucucccccggcgaacgcgccacccuauccugccgcgcaucccaauccguaggauccuccuaccucgccugguaccaacaaaaacccggccaagcaccccgccuccucaucuacggagccuucucccgcgccaccggcaucccugaccgcuucuccggcucaggcucaggcaccgacuucacccucaccaucucucgccuagaacccgaagacuucgccguauacuauugccaacaauacggcuccuccccuuggaccuucggccaaggaacaaaagucgaaaucaaacgaaccgucgccgcccccucagucuucaucuucccacccuccgacgaacaacucaaauccgguaccgccuccgucgucugccuucucaacaacuucuacccccgagaagccaaaguacaauggaaagucgacaacgcacuacaaucaggcaacucccaagaauccgucaccgaacaagauuccaaagacucaaccuacucacucuccuccacacucacccucuccaaagccgacuacgaaaaacacaaagucuacgccugcgaagucacccaccaaggacucuccagccccgucaccaaauccuucaaccgcggcgaaugcuaaggacuaguuauaagacugacuagcccgaugggccucccaacgggcccuccuccccuccuugcaccgagauuaauaaaaaaaaaaaaaaaaaaaaaaaaaaaaaaaaaaaaaaaaaaaaaaaaaaaaaaaaaaaaaaaaugcaucccccccccccccccccccccccccccccccaaaggcucuuuucagagccaccagaauu

SEQ ID NO: 899 - RNA, 925 nt, Artificial Sequence
  Ipilimumab LC with signale peptide
gggagaaagcuuaccauggaaacucccgcccaacuacucuuccuccuccuccucuggcuccccgacaccaccggcgaaaucguccuuacccagucccccggcacccucucacucucccccggcgaacgcgccacccuauccugucgcgccucccaaucagucggcucaucauaccucgccugguaccaacaaaaacccggccaagccccucgccuccucauauacggcgccuucucccgcgccaccggcauccccgaccgauucuccggcuccggcuccggcacugacuucacccucaccauaucccgccucgaacccgaagacuucgcagucuacuacugccaacaauacggaucuucccccuggaccuucggccaaggcaccaaagucgaaaucaaacgcaccgucgccgcccccuccgucuucauauucccacccucagacgaacaacucaaaucaggcaccgcauccgucgucugccuccucaacaacuucuacccccgcgaagccaaaguccaauggaaagucgacaacgcccuccaaucaggcaacucacaagaauccgucacagaacaagacuccaaagacucaaccuacucccucuccucaacccucacacucuccaaagccgacuacgaaaaacacaaagucuacgccugcgaagucacccaccaaggacuuuccucacccgucaccaaauccuucaaccgcggcgaaugcuaaggacuaguuauaagacugacuagcccgaugggccucccaacgggcccuccuccccuccuugcaccgagauuaauaaaaaaaaaaaaaaaaaaaaaaaaaaaaaaaaaaaaaaaaaaaaaaaaaaaaaaaaaaaaaaaaugcaucccccccccccccccccccccccccccccccaaaggcucuuuucagagccaccagaauu

SEQ ID NO: 900 - RNA, 925 nt, Artificial Sequence
  Ipilimumab LC with signale peptide
gggagaaagcuuaccauggaaacaccagcacaacuauuauuccuauuacuucuauggcuaccagacacaacaggagaaauaguauuaacacaaagcccaggaacacucucauuaucaccaggagaaagagcaacacucucaugccgagcaucccaauccgucggaucaucauaucuagcaugguaccaacaaaaaccaggacaagcacccagacuacuaauauacggagcauuuucaagagccacaggaaucccagacagauuuucaggaucaggaucaggaacagacuucacauuaacaauaucacgauuagaacccgaagacuucgcaguauacuacugccaacaauacggaucaucucccuggacauucggacaaggcacaaaaguagaaauaaaacgaacagucgcagcaccaucaguauucauauucccaccaucagacgaacaacuaaaaucaggaacagcaucaguaguaugccuauuaaauaacuucuacccaagagaagcaaaaguccaauggaaaguagauaacgcacuacaaucaggaaacucucaagaaucaguaaccgaacaagacucaaaagauucaaccuacucauuaucaucaacauuaacacuaucaaaagcagacuacgaaaaacacaaaguauacgcaugcgaaguaacccaccaaggccuaucaucaccaguaacaaaaucauucaacagaggagaaugcugaggacuaguuauaagacugacuagcccgaugggccucccaacgggcccuccuccccuccuugcaccgagauuaauaaaaaaaaaaaaaaaaaaaaaaaaaaaaaaaaaaaaaaaaaaaaaaaaaaaaaaaaaaaaaaaaugcaucccccccccccccccccccccccccccccccaaaggcucuuuucagagccaccagaauu

SEQ ID NO: 901 - RNA, 925 nt, Artificial Sequence
  Ipilimumab LC with signale peptide
gggagaaagcuuaccauggaaaccccugcccaauuacuauucuuauuauuacucuggcuaccagacacaacaggagaaauaguuuuaacacaaucaccaggcacacuaucacuaucaccaggagaaagagcaacacuaucaugcagagccucacaaucagucggaucaucauaccuagcaugguaucaacaaaaacccggacaagcaccaagauuauuaauauauggagcauucucacgagcaaccggaauaccagauagauucucaggaucaggaagcggcaccgacuucacauuaacaauaucuagacuagaaccagaagauuucgcaguauacuacugccaacaauauggaucuucaccauggacauucggacaaggaacaaaaguugaaauaaaaagaacaguagcagcaccaucaguauucauauucccaccaucagacgaacaauuaaaaucaggaacagccucuguaguaugccuauuaaacaacuuuuacccaagagaagcaaaaguucaauggaaaguagacaaugcacuacaaucaggcaacucacaagaaucaguaacagaacaagacucuaaagacucaacauauagccuaucaucaacacucacccuaucaaaagcagacuacgaaaaacacaaaguauacgcaugugaaguaacacaccaaggacuaucaucaccaguaacaaaaucauucaacagaggagaaugcuaaggacuaguuauaagacugacuagcccgaugggccucccaacgggcccuccuccccuccuugcaccgagauuaauaaaaaaaaaaaaaaaaaaaaaaaaaaaaaaaaaaaaaaaaaaaaaaaaaaaaaaaaaaaaaaaaugcaucccccccccccccccccccccccccccccccaaaggcucuuuucagagccaccagaauu

SEQ ID NO: 902 - RNA, 925 nt, Artificial Sequence
  Ipilimumab backbone Rituximab LC with signale peptide
gggagaaagcuuaccauggagacccccgcccagcugcucuuccugcugcuccuguggcugccggacaccacgggcgagaucgugcugacccagagccccggcacccucucccugagcccgggggagcgcgccacgcuguccugccgggccagccaguccgucggcagcuccuaccucgcgugguaccagcagaagcccgggcaggcgccccgccugcugaucuacggcgccuucagccgggccaccgggauccccgaccgcuucuccggcagcggcuccgggaccgacuucacccucacgaucagccggcuggagccggaggacuucgccguguacuacugccagcaguacggcuccagccccuggaccuucgggcagggcaccaagguggagaucaagcgcaccguggcggcccccagcguguucaucuucccgcccagcgacgagcagcugaagagcgggaccgccucggucgugugccuccugaacaacuucuacccccgggaggccaaggugcaguggaaggucgacaacgcgcugcagagcggcaacagccaggagagcgugacggagcaggacagcaaggacagcaccuacucgcucagcagcacccugacccugagcaaggccgacuacgagaagcacaagguguacgccugcgaggucacgcaccaggggcucagcucgcccgugaccaagagcuucaaccgcggggagugcugaggacuaguuauaagacugacuagcccgaugggccucccaacgggcccuccuccccuccuugcaccgagauuaauaaaaaaaaaaaaaaaaaaaaaaaaaaaaaaaaaaaaaaaaaaaaaaaaaaaaaaaaaaaaaaaaugcaucccccccccccccccccccccccccccccccaaaggcucuuuucagagccaccagaauu

SEQ ID NO: 903 - RNA, 925 nt, Artificial Sequence
  Ipilimumab backbone Rituximab LC with signale peptide
gggagaaagcuuaccauggagacccccgcccagcuucucuuccuucuguuguuauggcugccugacacaacuggcgaaaucgugcuaacgcaaagcccagggacccucucccugucuccgggagagagagcuacacuuucaugcagggcaagucagagcgucgguuccucuuaccuggccugguaucagcagaagcccggccaagcgccucgguugcucauuuacggggcuuuuucgcgcgccacuggaauaccagaucgauucucaggcagcgguagugggaccgacuuuacacugaccaucucccgucuggaacccgaggauuucgcaguuuauuacugucagcaguauggaucuagcccuuggacuuuuggccagggcacaaaaguggaaauuaagagaaccguggcggcccccagcguguucaucuucccgcccagcgacgagcagcugaagagcgggaccgccucggucgugugccuccugaacaacuucuacccccgggaggccaaggugcaguggaaggucgacaacgcgcugcagagcggcaacagccaggagagcgugacggagcaggacagcaaggacagcaccuacucgcucagcagcacccugacccugagcaaggccgacuacgagaagcacaagguguacgccugcgaggucacgcaccaggggcucagcucgcccgugaccaagagcuucaaccgcggcgagugcugaggacuaguuauaagacugacuagcccgaugggccucccaacgggcccuccuccccuccuugcaccgagauuaauaaaaaaaaaaaaaaaaaaaaaaaaaaaaaaaaaaaaaaaaaaaaaaaaaaaaaaaaaaaaaaaaugcaucccccccccccccccccccccccccccccccaaaggcucuuuucagagccaccagaauu

SEQ ID NO: 904 - RNA, 925 nt, Artificial Sequence
  Ipilimumab backbone Rituximab LC with signale peptide
gggagaaagcuuaccauggagacccccgcccagcugcuguuccugcugcugcuguggcugcccgacaccaccggcgagaucgugcugacccagagccccggcacccugagccugagccccggcgagagagccacccugagcugcagagccagccagagcgugggcagcagcuaccuggccugguaccagcagaagcccggccaggcccccagacugcugaucuacggcgccuucagcagagccaccggcauccccgacagauucagcggcagcggcagcggcaccgacuucacccugaccaucagcagacuggagcccgaggacuucgccguguacuacugccagcaguacggcagcagccccuggaccuucggccagggcaccaagguggagaucaagagaaccguggcggcccccagcguguucaucuucccgcccagcgacgagcagcugaagagcgggaccgccucggucgugugccuccugaacaacuucuacccccgggaggccaaggugcaguggaaggucgacaacgcgcugcagagcggcaacagccaggagagcgugacggagcaggacagcaaggacagcaccuacucgcucagcagcacccugacccugagcaaggccgacuacgagaagcacaagguguacgccugcgaggucacgcaccaggggcucagcucgcccgugaccaagagcuucaaccgcggcgagugcugaggacuaguuauaagacugacuagcccgaugggccucccaacgggcccuccuccccuccuugcaccgagauuaauaaaaaaaaaaaaaaaaaaaaaaaaaaaaaaaaaaaaaaaaaaaaaaaaaaaaaaaaaaaaaaaaugcaucccccccccccccccccccccccccccccccaaaggcucuuuucagagccaccagaauu

SEQ ID NO: 905 - RNA, 865 nt, Artificial Sequence
  Ipilimumab LC without signale peptide
gggagaaagcuuaccgagaucgugcugacccagagccccggcacccucucccugagcccgggggagcgcgccacgcuguccugccgggccagccaguccgucggcagcuccuaccucgcgugguaccagcagaagcccgggcaggcgccccgccugcugaucuacggcgccuucagccgggccaccgggauccccgaccgcuucuccggcagcggcuccgggaccgacuucacccucacgaucagccggcuggagccggaggacuucgccguguacuacugccagcaguacggcuccagccccuggaccuucgggcagggcaccaagguggagaucaagcgcaccgucgccgcccccuccguguucaucuucccgcccagcgacgagcagcugaaguccgggacggccagcguggucugccuccugaacaacuucuacccccgggaggccaaggugcaguggaagguggacaacgcgcugcaguccggcaacagccaggagagcgucaccgagcaggacuccaaggacagcaccuacucccucagcuccacccugacgcugagcaaggccgacuacgagaagcacaagguguacgccugcgaggugacccaccagggccucuccagccccgucaccaaguccuucaaccgcggggagugcugaggacuaguuauaagacugacuagcccgaugggccucccaacgggcccuccuccccuccuugcaccgagauuaauaaaaaaaaaaaaaaaaaaaaaaaaaaaaaaaaaaaaaaaaaaaaaaaaaaaaaaaaaaaaaaaaugcaucccccccccccccccccccccccccccccccaaaggcucuuuucagagccaccagaauu

SEQ ID NO: 906 - RNA, 865 nt, Artificial Sequence
  Ipilimumab LC without signale peptide
gggagaaagcuuaccgagaucguccucacccagucccccggcacccucucccucucccccggcgagcgcgccacccucuccugccgcgccucccaguccgucggcuccuccuaccucgccugguaccagcagaagcccggccaggccccccgccuccucaucuacggcgccuucucccgcgccaccggcauccccgaccgcuucuccggcuccggcuccggcaccgacuucacccucaccaucucccgccucgagcccgaggacuucgccgucuacuacugccagcaguacggcuccucccccuggaccuucggccagggcaccaaggucgagaucaagcgcaccgucgccgcccccuccgucuucaucuucccccccuccgacgagcagcucaaguccggcaccgccuccgucgucugccuccucaacaacuucuacccccgcgaggccaagguccaguggaaggucgacaacgcccuccaguccggcaacucccaggaguccgucaccgagcaggacuccaaggacuccaccuacucccucuccuccacccucacccucuccaaggccgacuacgagaagcacaaggucuacgccugcgaggucacccaccagggccucuccucccccgucaccaaguccuucaaccgcggcgagugcugaggacuaguuauaagacugacuagcccgaugggccucccaacgggcccuccuccccuccuugcaccgagauuaauaaaaaaaaaaaaaaaaaaaaaaaaaaaaaaaaaaaaaaaaaaaaaaaaaaaaaaaaaaaaaaaaugcaucccccccccccccccccccccccccccccccaaaggcucuuuucagagccaccagaauu

SEQ ID NO: 907 - RNA, 865 nt, Artificial Sequence
  Ipilimumab LC without signale peptide
gggagaaagcuuaccgagaucgugcugacccagagccccggcacacucucccuuucuccuggggaaagagccacucugucaugcagggcuagucaaagcgucggauccucuuacuuggcaugguaucagcagaagccaggucaggccccgcgguuacugauuuacggcgcguucucgcgcgcuacggggauacccgaccgauuuucaggaagcggcagugguaccgauuucacacuaacuaucucccgucucgagccugaagacuuugccguuuauuacugucaacaguaugggucuagcccauggaccuucggacagggcacaaaaguggagauuaagagaaccguagcagcccccuccguguuuaucuucccuccaucagaugaacagcugaaaaguggcacugcuagcgucgugugccuucugaacaauuuuuaccccagggaggcaaagguucaauggaaaguggacaacgccuugcagucuggaaauucccaggagucagucacagaacaggauagcaaggacaguaccuauucucucuccagcacgcugacucugucgaaggcugauuacgagaaacacaagguguacgccugugaaguaacccaucaagggcucucuuccccuguuacaaaaucauucaaccggggugagugcugaggacuaguuauaagacugacuagcccgaugggccucccaacgggcccuccuccccuccuugcaccgagauuaauaaaaaaaaaaaaaaaaaaaaaaaaaaaaaaaaaaaaaaaaaaaaaaaaaaaaaaaaaaaaaaaaugcaucccccccccccccccccccccccccccccccaaaggcucuuuucagagccaccagaauu

SEQ ID NO: 908 - RNA, 865 nt, Artificial Sequence
  Ipilimumab LC without signale peptide
gggagaaagcuuaccgagaucgugcugacccagagccccggcacccugagccugagccccggcgagagagccacccugagcugcagagccagccagagcgugggcagcagcuaccuggccugguaccagcagaagcccggccaggcccccagacugcugaucuacggcgccuucagcagagccaccggcauccccgacagauucagcggcagcggcagcggcaccgacuucacccugaccaucagcagacuggagcccgaggacuucgccguguacuacugccagcaguacggcagcagccccuggaccuucggccagggcaccaagguggagaucaagagaaccguggccgcccccagcguguucaucuucccccccagcgacgagcagcugaagagcggcaccgccagcguggugugccugcugaacaacuucuaccccagagaggccaaggugcaguggaagguggacaacgcccugcagagcggcaacagccaggagagcgugaccgagcaggacagcaaggacagcaccuacagccugagcagcacccugacccugagcaaggccgacuacgagaagcacaagguguacgccugcgaggugacccaccagggccugagcagccccgugaccaagagcuucaacagaggcgagugcugaggacuaguuauaagacugacuagcccgaugggccucccaacgggcccuccuccccuccuugcaccgagauuaauaaaaaaaaaaaaaaaaaaaaaaaaaaaaaaaaaaaaaaaaaaaaaaaaaaaaaaaaaaaaaaaaugcaucccccccccccccccccccccccccccccccaaaggcucuuuucagagccaccagaauu

SEQ ID NO: 909 - RNA, 865 nt, Artificial Sequence
  Ipilimumab LC without signale peptide
gggagaaagcuuaccgagaucgugcugacccagagccccggcacacucagccugucuccuggggaaagagccacgcuuagcugccgggcuucccaaucugucggaagcuccuaccuggccugguaucagcagaagccgggccaggcgccccgccuccugauuuacggggcuuucucuagagccaccggaaucccugaccgguuuagcggcuccgggagcggaacagauuucacccuuacaauuucucgccuggagcccgaagacuuugccguuuauuacugucaacaguauggcuccagcccuuggaccuucggccaggggacaaaaguggagaucaagagaaccguggcugcccccucugucuuuauuuucccuccguccgaugaacagcucaaaagcggaacggcuucugugguuugccugcugaacaauuuuuacccccgggaggccaaggugcaauggaaagucgacaacgcgcuccaguccggcaauagccaggaguccgugaccgaacaggauucuaaggacagcacauauucccugagcucuacccuuacacuguccaaggccgauuacgagaaacacaagguuuacgcuugugaagugacccaucaagggcucagcucuccugucacgaaauccuucaaccgcggagagugcugaggacuaguuauaagacugacuagcccgaugggccucccaacgggcccuccuccccuccuugcaccgagauuaauaaaaaaaaaaaaaaaaaaaaaaaaaaaaaaaaaaaaaaaaaaaaaaaaaaaaaaaaaaaaaaaaugcaucccccccccccccccccccccccccccccccaaaggcucuuuucagagccaccagaauu

SEQ ID NO: 910 - RNA, 865 nt, Artificial Sequence
  Ipilimumab LC without signale peptide
gggagaaagcuuaccgaaauaguacuaacacaaucaccaggaacccucucacuaucuccaggagaaagagcaacacuaagcugcagagccucacaaucagucggaucaucauaccuagcaugguaccaacaaaaaccaggacaagcccccagauuacuaaucuacggagcauucucacgagcaacaggaaucccagacagauucucagguuccggaucaggaacagacuucacacuaacaauauccagauuagaaccagaagacuucgcaguauacuacugccaacaauacggaucaucaccauggacauuuggacaaggaaccaaaguagaaaucaaaagaacaguagcagccccaucaguauuuauauucccaccaucagacgaacaacuaaaaucaggcaccgcaucaguaguaugucuauuaaacaacuucuacccaagagaagcaaaaguacaauggaaaguagacaacgcacuacaaucaggaaacucccaagaaucagucacagaacaagacucaaaagacucaacauacucacuaucaucaacacuaaccuuaucaaaagcagacuacgaaaaacacaaaguauacgcaugcgaaguaacacaccaaggauuaucauccccaguaacaaaaucauucaacagaggagaaugcugaggacuaguuauaagacugacuagcccgaugggccucccaacgggcccuccuccccuccuugcaccgagauuaauaaaaaaaaaaaaaaaaaaaaaaaaaaaaaaaaaaaaaaaaaaaaaaaaaaaaaaaaaaaaaaaaugcaucccccccccccccccccccccccccccccccaaaggcucuuuucagagccaccagaauu

SEQ ID NO: 911 - RNA, 865 nt, Artificial Sequence
  Ipilimumab LC without signale peptide
gggagaaagcuuaccgagaucgugcugacccagagccccggcacucucucccugaguccaggggaaagggccaccuugagcugccgggcaucccaaagugucgguagcuccuaccuggccugguaucagcagaagccgggccaggcgccccgccuccugauuuacggggccuucagcagggcaacgggcaucccagaccgguuuuccgguagugggagcggcacugauuucaccuugaccauuucccgccuggagcccgaagacuuugccguguauuacugucaacaguauggcagcaguccauggacuuucgggcaggguaccaaaguagagaucaagaggacgguggcagcccccuccgucuuuauuuucccaccgagcgaugaacagcucaaauccggcacugcgaguguggugugccugcugaacaauuuuuacccccgggaggccaagguccaauggaaaguggacaacgcacuccagagcggcaauucccaggagagcguaaccgaacaggauaguaaggacuccacuuauagccugaguuccaccuugacccugagcaaggccgauuacgagaaacacaagguguacgccugugaagucacgcaucaagggcucagcuccccagugacuaaaaguuucaaccgcggugagugcugaggacuaguuauaagacugacuagcccgaugggccucccaacgggcccuccuccccuccuugcaccgagauuaauaaaaaaaaaaaaaaaaaaaaaaaaaaaaaaaaaaaaaaaaaaaaaaaaaaaaaaaaaaaaaaaaugcaucccccccccccccccccccccccccccccccaaaggcucuuuucagagccaccagaauu

SEQ ID NO: 912 - RNA, 865 nt, Artificial Sequence
  Ipilimumab LC without signale peptide
gggagaaagcuuaccgaaaucguccuaacccaaucccccggcacacuaucucucuccccaggcgaacgcgcaacacuauccugccgcgccucacaaucagucggcuccuccuaccuagccugguaccaacaaaaacccggccaagcaccccgacuccucaucuacggcgccuucucccgcgccacaggcaucccagaccgcuucuccggcuccggcuccggcacagacuucacacucaccaucucacgccucgaacccgaagacuucgccgucuacuacugccaacaauacggaucaucccccuggaccuucggacaaggcaccaaagucgaaaucaaacgcaccgucgccgcccccuccgucuucaucuucccacccucagacgaacaacuaaaauccggcaccgccucaguagucugccuacuaaacaacuucuacccccgcgaagccaaaguccaauggaaagucgacaacgcccuccaauccggcaacucacaagaaucagucaccgaacaagacucaaaagacuccaccuacucccuauccuccacccucacccuaucaaaagccgacuacgaaaaacacaaaguauacgcgugcgaaguaacccaccagggccuauccucacccgucacaaaauccuucaaccgcggcgaaugcugaggacuaguuauaagacugacuagcccgaugggccucccaacgggcccuccuccccuccuugcaccgagauuaauaaaaaaaaaaaaaaaaaaaaaaaaaaaaaaaaaaaaaaaaaaaaaaaaaaaaaaaaaaaaaaaaugcaucccccccccccccccccccccccccccccccaaaggcucuuuucagagccaccagaauu

SEQ ID NO: 913 - RNA, 865 nt, Artificial Sequence
  Ipilimumab LC without signale peptide
gggagaaagcuuaccgaaaucguacuaacccaaucacccggcacccucucccucucccccggcgaacgagccacccuaucaugccgcgccucccaauccguaggcuccuccuaccuagccugguaccaacaaaaaccaggccaagcaccccgacuacucaucuacggagccuucucccgcgccaccggcauccccgaccgcuucuccggcuccggcuccggcaccgacuucacccucaccaucucccgccucgaacccgaagacuucgccgucuacuacugccaacaauacggaucaucccccuggaccuucggccaaggcaccaaagucgaaaucaaacgcaccgucgccgcccccuccgucuucauauucccacccuccgacgaacaacuaaaaucaggaaccgccuccgucgucugccuacuaaacaacuucuacccccgcgaagccaaaguacaauggaaagucgacaacgcccuccaauccggcaacucccaagaauccguaaccgaacaagacuccaaagacucaaccuauucccucuccuccacacucacacuauccaaagccgacuacgaaaaacacaaagucuacgccugcgaaguaacccaccaaggccucucaucacccgucaccaaauccuucaaccgcggcgaaugcuaaggacuaguuauaagacugacuagcccgaugggccucccaacgggcccuccuccccuccuugcaccgagauuaauaaaaaaaaaaaaaaaaaaaaaaaaaaaaaaaaaaaaaaaaaaaaaaaaaaaaaaaaaaaaaaaaugcaucccccccccccccccccccccccccccccccaaaggcucuuuucagagccaccagaauu

SEQ ID NO: 914 - RNA, 865 nt, Artificial Sequence
  Ipilimumab LC without signale peptide
gggagaaagcuuaccgaaaucguccucacccaaucccccggcacccuaucacucucacccggcgaacgcgcaacccucuccugccgagccucccaauccgucggcuccucauaccucgccugguaccaacaaaaacccggccaagcaccccgucuccucaucuacggcgccuucucacgcgccaccggcauccccgaccgcuucuccggcucuggcucaggcaccgacuucacccucaccaucucccgccucgaacccgaagacuucgccgucuacuacugccaacaauacggaucaucccccuggaccuucggccaaggcacaaaagucgaaaucaaacgcaccgucgccgccccauccgucuucaucuucccacccuccgacgaacaacucaaauccggcaccgccuccgucgucugccuccucaacaacuucuacccccgcgaagccaaaguccaauggaaagucgacaacgcccuccaauccggcaacucccaagaauccgucaccgaacaagacuccaaagacuccaccuacucacucuccuccacccuuacccucuccaaagccgacuacgaaaaacacaaagucuacgccugcgaagucacccaccaaggccucuccucccccgucaccaaauccuucaaccgcggcgaaugcuaaggacuaguuauaagacugacuagcccgaugggccucccaacgggcccuccuccccuccuugcaccgagauuaauaaaaaaaaaaaaaaaaaaaaaaaaaaaaaaaaaaaaaaaaaaaaaaaaaaaaaaaaaaaaaaaaugcaucccccccccccccccccccccccccccccccaaaggcucuuuucagagccaccagaauu

SEQ ID NO: 915 - RNA, 865 nt, Artificial Sequence
  Ipilimumab LC without signale peptide
gggagaaagcuuaccgaaauaguacuaacacaaucaccaggaacacuaucacucucaccuggagaaagagcaacauuauccugcagagcaucacaaucuguaggaucuucauaccuagcaugguaccaacaaaaaccaggacaagcaccaagauuacuaauauauggagcauuuuccagagcaacaggcauaccagacagauucucaggaucaggaucaggaaccgacuucacacuaacaauaucaagacuagaaccagaagacuucgcaguauacuacugccaacaauacggaucaucaccauggacauucggacaaggaacaaaaguagaaauaaaaagaacagucgcagcaccaucaguauucauauucccaccaucagacgaacaauuaaaauccggaacagcaucaguaguaugccuacuaaauaacuucuacccaagagaagcaaaaguacaauggaaaguagacaacgcauuacaaucaggaaacucccaagaaucaguaacagaacaagacucuaaagacucaacauacucccuaucaucaacacuaacacuaucaaaagcagacuaugaaaaacacaaaguauacgcaugcgaagucacacaucaaggacuaucaucaccaguaacaaaaucauuuaacagaggagaaugcuaaggacuaguuauaagacugacuagcccgaugggccucccaacgggcccuccuccccuccuugcaccgagauuaauaaaaaaaaaaaaaaaaaaaaaaaaaaaaaaaaaaaaaaaaaaaaaaaaaaaaaaaaaaaaaaaaugcaucccccccccccccccccccccccccccccccaaaggcucuuuucagagccaccagaauu

SEQ ID NO: 916 - RNA, 865 nt, Artificial Sequence
  Ipilimumab LC without signale peptide
gggagaaagcuuaccgaaauaguacuaacacaaucaccaggaacauuaucacuauccccaggagaaagagcaacauuaucaugcagagcaucacaaucaguaggaucaucauaccuagccugguaccaacaaaaaccaggacaagccccaagauuacuaauauacggagcauucucaagagcaacaggaauaccagacagauucucagguucuggcucaggcacagacuucacacucacaauaucaagacuagaaccagaagacuucgccguauacuacugccaacaauacggauccucaccauggacauucggacaaggaacaaaaguagaaauaaaacgaacaguagcagcaccaucaguauucauauucccaccaucagacgaacaauuaaaaucaggaacagcaucaguaguaugccuauuaaacaacuucuacccacgagaagccaaaguccaauggaaaguagauaacgcauuacaaucagguaacucacaagaaucaguaacagaacaagacuccaaagacucaacauacagccuaucaucaacacuaacauuaucaaaagcagacuaugaaaaacacaaaguauacgcaugcgagguaacacaccaaggacuaucaucaccaguaacaaaaucauucaauagaggagaaugcuaaggacuaguuauaagacugacuagcccgaugggccucccaacgggcccuccuccccuccuugcaccgagauuaauaaaaaaaaaaaaaaaaaaaaaaaaaaaaaaaaaaaaaaaaaaaaaaaaaaaaaaaaaaaaaaaaugcaucccccccccccccccccccccccccccccccaaaggcucuuuucagagccaccagaauu

SEQ ID NO: 917 - RNA, 865 nt, Artificial Sequence
  Ipilimumab backbone Rituximab LC without signale peptide
gggagaaagcuuaccgagaucgugcugacccagagccccggcacccucucccugagcccgggggagcgcgccacgcuguccugccgggccagccaguccgucggcagcuccuaccucgcgugguaccagcagaagcccgggcaggcgccccgccugcugaucuacggcgccuucagccgggccaccgggauccccgaccgcuucuccggcagcggcuccgggaccgacuucacccucacgaucagccggcuggagccggaggacuucgccguguacuacugccagcaguacggcuccagccccuggaccuucgggcagggcaccaagguggagaucaagcgcaccguggcggcccccagcguguucaucuucccgcccagcgacgagcagcugaagagcgggaccgccucggucgugugccuccugaacaacuucuacccccgggaggccaaggugcaguggaaggucgacaacgcgcugcagagcggcaacagccaggagagcgugacggagcaggacagcaaggacagcaccuacucgcucagcagcacccugacccugagcaaggccgacuacgagaagcacaagguguacgccugcgaggucacgcaccaggggcucagcucgcccgugaccaagagcuucaaccgcggggagugcugaggacuaguuauaagacugacuagcccgaugggccucccaacgggcccuccuccccuccuugcaccgagauuaauaaaaaaaaaaaaaaaaaaaaaaaaaaaaaaaaaaaaaaaaaaaaaaaaaaaaaaaaaaaaaaaaugcaucccccccccccccccccccccccccccccccaaaggcucuuuucagagccaccagaauu

SEQ ID NO: 918 - RNA, 865 nt, Artificial Sequence
  Ipilimumab backbone Rituximab LC without signale peptide
gggagaaagcuuaccgagaucgugcugacccagagccccggcacacucucccuuucuccuggggaaagagccacucugucaugcagggcuagucaaagcgucggauccucuuacuuggcaugguaucagcagaagccaggucaggccccgcgguuacugauuuacggcgcguucucgcgcgcuacggggauacccgaccgauuuucaggaagcggcagugguaccgauuucacacuaacuaucucccgucucgagccugaagacuuugccguuuauuacugucaacaguaugggucuagcccauggaccuucggacagggcacaaaaguggagauuaagagaaccguggcggcccccagcguguucaucuucccgcccagcgacgagcagcugaagagcgggaccgccucggucgugugccuccugaacaacuucuacccccgggaggccaaggugcaguggaaggucgacaacgcgcugcagagcggcaacagccaggagagcgugacggagcaggacagcaaggacagcaccuacucgcucagcagcacccugacccugagcaaggccgacuacgagaagcacaagguguacgccugcgaggucacgcaccaggggcucagcucgcccgugaccaagagcuucaaccgcggugagugcugaggacuaguuauaagacugacuagcccgaugggccucccaacgggcccuccuccccuccuugcaccgagauuaauaaaaaaaaaaaaaaaaaaaaaaaaaaaaaaaaaaaaaaaaaaaaaaaaaaaaaaaaaaaaaaaaugcaucccccccccccccccccccccccccccccccaaaggcucuuuucagagccaccagaauu

SEQ ID NO: 919 - RNA, 865 nt, Artificial Sequence
  Ipilimumab backbone Rituximab LC without signale peptide
gggagaaagcuuaccgagaucgugcugacccagagccccggcacccugagccugagccccggcgagagagccacccugagcugcagagccagccagagcgugggcagcagcuaccuggccugguaccagcagaagcccggccaggcccccagacugcugaucuacggcgccuucagcagagccaccggcauccccgacagauucagcggcagcggcagcggcaccgacuucacccugaccaucagcagacuggagcccgaggacuucgccguguacuacugccagcaguacggcagcagccccuggaccuucggccagggcaccaagguggagaucaagagaaccguggcggcccccagcguguucaucuucccgcccagcgacgagcagcugaagagcgggaccgccucggucgugugccuccugaacaacuucuacccccgggaggccaaggugcaguggaaggucgacaacgcgcugcagagcggcaacagccaggagagcgugacggagcaggacagcaaggacagcaccuacucgcucagcagcacccugacccugagcaaggccgacuacgagaagcacaagguguacgccugcgaggucacgcaccaggggcucagcucgcccgugaccaagagcuucaaccgcggcgagugcugaggacuaguuauaagacugacuagcccgaugggccucccaacgggcccuccuccccuccuugcaccgagauuaauaaaaaaaaaaaaaaaaaaaaaaaaaaaaaaaaaaaaaaaaaaaaaaaaaaaaaaaaaaaaaaaaugcaucccccccccccccccccccccccccccccccaaaggcucuuuucagagccaccagaauu

SEQ ID NO: 920 - RNA, 3008 nt, Artificial Sequence
  Ipilimumab opt1 IRES construct
gggagaaagcuuaccauggagcugggccucagcuggaucuuccugcuggccauccucaagggggugcagugccaggugcagcuggucgagagcggcgggggcguggugcagcccgggcgcucccuccggcugagcugcgccgccuccggcuucaccuucagcuccuacaccaugcacuggguccgccaggcgccggggaagggccuggagugggugacguucaucagcuacgacggcaacaacaaguacuacgccgacuccgugaaggggcgguucaccaucagccgcgacaacuccaagaacacccucuaccugcagaugaacagccugcgggccgaggacaccgccaucuacuacugcgcccgcacgggcuggcucgggcccuucgacuacuggggccaggggacccuggucaccguguccagcgcguccaccaagggccccagcguguucccccuggccccguccagcaaguccacgagcggcgggaccgccgcccucggcugccuggucaaggacuacuuccccgagcccgugaccguguccuggaacagcggggcgcugaccagcggcguccacacguuccccgccgugcuccaguccagcggccuguacucccugagcuccguggucaccgugccgagcuccagccucgggacccagaccuacaucugcaacgugaaccacaagcccuccaacacgaaggucgacaagcggguggagcccaagagcugcgacaagacccacacgugcccgcccugccccgcccccgagcugcugggcgggcccuccguguuccucuucccgcccaagcccaaggacacccugaugaucagccgcacccccgaggugaccugcgucguggucgacgugucccacgaggacccggaggucaaguucaacugguacguggacggcguggagguccacaacgccaagaccaagccccgggaggagcaguacaacagcaccuaccgcgugguguccguccugacggugcuccaccaggacuggcugaacgggaaggaguacaagugcaaggugagcaacaaggcccugcccgcgcccaucgagaagaccaucuccaaggccaagggccagccgcgggagccccaggucuacacccucccgcccagccgcgacgagcugaccaagaaccaggugucccugacgugccucgugaagggcuucuaccccagcgacaucgccgucgagugggagagcaacgggcagcccgagaacaacuacaagaccacgcccccggugcuggacuccgacggcagcuucuuccuguacuccaagcucaccguggacaagagccgguggcagcaggggaacgucuucuccugcagcgugaugcacgaggcccugcacaaccacuacacccagaagucccugagccucucccccggcaagugaccaugcauuugaaagccgggggugggagauccggauugccagucugcucgauaucgcaggcuggguccgugacuacccacucccccuuuaauuccgccccucucccuccccccccccuaacguuacuggccgaagccgcuuggaauaaggccggugugcguuugucuauauguuauuuuccaccauauugccgucuuuuggcaaugugagggcccggaaaccuggcccugucuucuugacgagcauuccuaggggucuuuccccucucgccaaaggaaugcaaggucuguugaaugucgugaaggaagcaguuccucuggaagcuucuugaagacaaacaacgucuguagcgacccuuugcaggcagcggaaccccccaccuggcgacaggugccucugcggccaaaagccacguguauaagauacaccugcaaaggcggcacaaccccagugccacguugugaguuggauaguuguggaaagagucaaauggcucuccucaagcguauucaacaaggggcugaaggaugcccagaagguaccccauuguaugggaucugaucuggggccucggugcacaugcuuuacguguguuuagucgagguuaaaaaacgucuaggccccccgaaccacggggacgugguuuuccuuugaaaaacacgaugauaauagaucuaccauggagacccccgcccagcugcucuuccugcugcuccuguggcugccggacaccacgggcgagaucgugcugacccagagccccggcacccucucccugagcccgggggagcgcgccacgcuguccugccgggccagccaguccgucggcagcuccuaccucgcgugguaccagcagaagcccgggcaggcgccccgccugcugaucuacggcgccuucagccgggccaccgggauccccgaccgcuucuccggcagcggcuccgggaccgacuucacccucacgaucagccggcuggagccggaggacuucgccguguacuacugccagcaguacggcuccagccccuggaccuucgggcagggcaccaagguggagaucaagcgcaccgucgccgcccccuccguguucaucuucccgcccagcgacgagcagcugaaguccgggacggccagcguggucugccuccugaacaacuucuacccccgggaggccaaggugcaguggaagguggacaacgcgcugcaguccggcaacagccaggagagcgucaccgagcaggacuccaaggacagcaccuacucccucagcuccacccugacgcugagcaaggccgacuacgagaagcacaagguguacgccugcgaggugacccaccagggccucuccagccccgucaccaaguccuucaaccgcggggagugcugaggacuaguuauaagacugacuagcccgaugggccucccaacgggcccuccuccccuccuugcaccgagauuaauaaaaaaaaaaaaaaaaaaaaaaaaaaaaaaaaaaaaaaaaaaaaaaaaaaaaaaaaaaaaaaaaugcaucccccccccccccccccccccccccccccccaaaggcucuuuucagagccaccagaauu

SEQ ID NO: 921 - RNA, 3008 nt, Artificial Sequence
  Ipilimumab opt3 IRES construct
gggagaaagcuuaccauggagcugggccucagcuggaucuuccuucuggccauuuugaagggggugcagugccaaguccaguuaguugaauccggagguggcgugguacagcccgggagaucucugaggcuaucaugugcugcaaguggauuuaccuucagcuccuacacaaugcacugggugcggcaggccccuggcaaaggucucgagugggucacuuuuauaucuuaugacgggaacaauaaguacuaugcggauucggugaaaggacgcuucacgaucucacgagacaacagcaagaauacccuguaccuucaaaugaacagucugcgugcugaagauacagccauuuauuacugcgcaagaacuggcugguugggcccauuugacuauugggggcagggaacccucguuacaguguccucugccagcaccaaagguccguccgucuucccccuggcuccuucaaguaagagcacuucuggcgggacagcagcccugggaugucucgugaaggauuacuuuccagagcccguaaccguuuccuggaacucaggcgcuuuaacgagcggugugcauacuuucccugccguccugcagaguucugggcuuuacuccuugagcucgguggugaccgucccaucuuccucacugggaacacagacuuauaucugcaauguuaaucacaaacccaguaacaccaagguggacaaaaggguagaaccuaagagcugugauaaaacacauaccugcccaccgugucccgcgccugagcuacucggcggcccauccguguuucuguuucccccuaagccaaaggacacgcuuaugauuucucggacucccgaggucacaugcgugguuguggaugucagccacgaagacccggaggugaaauuuaauugguacguagaugggguugaagugcauaacgcaaagaccaaaccucgcgaggagcaauauaauucaacuuacagagucgugaguguccugacaguguugcaccaggacuggcucaacggaaaggaauauaaauguaagguuuccaauaaagcccugcccgcuccaaucgagaagaccauaagcaaggccaaaggucagccuagggaaccccagguguacacguuaccacccucucgggaugagcugaccaagaaccaaguaucacucacaugccuugucaaaggcuucuauccuagugacaucgcaguggaaugggagagcaaugggcagccagagaacaacuacaagacuaccccgcccguucuggacuccgauggaucuuucuucuuguacucgaaacuaacaguggacaagagccgcuggcagcaaggcaaugucuucuccuguucagugaugcacgaagcucugcauaaccacuauacucagaagagucucucucugagcccugguaaaugaccaugcauuugaaagccgggggugggagauccggauugccagucugcucgauaucgcaggcuggguccgugacuacccacucccccuuuaauuccgccccucucccuccccccccccuaacguuacuggccgaagccgcuuggaauaaggccggugugcguuugucuauauguuauuuuccaccauauugccgucuuuuggcaaugugagggcccggaaaccuggcccugucuucuugacgagcauuccuaggggucuuuccccucucgccaaaggaaugcaaggucuguugaaugucgugaaggaagcaguuccucuggaagcuucuugaagacaaacaacgucuguagcgacccuuugcaggcagcggaaccccccaccuggcgacaggugccucugcggccaaaagccacguguauaagauacaccugcaaaggcggcacaaccccagugccacguugugaguuggauaguuguggaaagagucaaauggcucuccucaagcguauucaacaaggggcugaaggaugcccagaagguaccccauuguaugggaucugaucuggggccucggugcacaugcuuuacguguguuuagucgagguuaaaaaacgucuaggccccccgaaccacggggacgugguuuuccuuugaaaaacacgaugauaauagaucuaccauggagacccccgcccagcuucucuuccuucuguuguuauggcugccugacacaacuggcgaaaucgugcuaacgcaaagcccagggacccucucccugucuccgggagagagagcuacacuuucaugcagggcaagucagagcgucgguuccucuuaccuggccugguaucagcagaagcccggccaagcgccucgguugcucauuuacggggcuuuuucgcgcgccacuggaauaccagaucgauucucaggcagcgguagugggaccgacuuuacacugaccaucucccgucuggaacccgaggauuucgcaguuuauuacugucagcaguauggaucuagcccuuggacuuuuggccagggcacaaaaguggaaauuaagagaaccguagccgcuccauccguguucaucuuucccccuucagacgagcaacucaaaagugggacggcaagcgucgugugcuuacugaacaauuucuacccaagggaggccaagguucaguggaaaguggauaacgcucugcagucuggaaauucccaggaaucagucacugagcaagacagcaaggauaguaccuauucuuuguccagcacacugacucuaucgaaggccgacuacgaaaaacacaagguguacgcgugugagguaacccaucagggucucucuuccccgguuacaaaaucauuuaaccggggcgagugcugaggacuaguuauaagacugacuagcccgaugggccucccaacgggcccuccuccccuccuugcaccgagauuaauaaaaaaaaaaaaaaaaaaaaaaaaaaaaaaaaaaaaaaaaaaaaaaaaaaaaaaaaaaaaaaaaugcaucccccccccccccccccccccccccccccccaaaggcucuuuucagagccaccagaauu

SEQ ID NO: 922 - RNA, 3008 nt, Artificial Sequence
  Ipilimumab opt4 IRES construct
gggagaaagcuuaccauggagcugggccugagcuggaucuuccugcuggccauccugaagggcgugcagugccaggugcagcugguggagagcggcggcggcguggugcagcccggcagaagccugagacugagcugcgccgccagcggcuucaccuucagcagcuacaccaugcacugggugagacaggcccccggcaagggccuggagugggugaccuucaucagcuacgacggcaacaacaaguacuacgccgacagcgugaagggcagauucaccaucagcagagacaacagcaagaacacccuguaccugcagaugaacagccugagagccgaggacaccgccaucuacuacugcgccagaaccggcuggcugggccccuucgacuacuggggccagggcacccuggugaccgugagcagcgccagcaccaagggccccagcguguucccccuggcccccagcagcaagagcaccagcggcggcaccgccgcccugggcugccuggugaaggacuacuuccccgagcccgugaccgugagcuggaacagcggcgcccugaccagcggcgugcacaccuuccccgccgugcugcagagcagcggccuguacagccugagcagcguggugaccgugcccagcagcagccugggcacccagaccuacaucugcaacgugaaccacaagcccagcaacaccaagguggacaagagaguggagcccaagagcugcgacaagacccacaccugcccccccugccccgcccccgagcugcugggcggccccagcguguuccuguucccccccaagcccaaggacacccugaugaucagcagaacccccgaggugaccugcguggugguggacgugagccacgaggaccccgaggugaaguucaacugguacguggacggcguggaggugcacaacgccaagaccaagcccagagaggagcaguacaacagcaccuacagaguggugagcgugcugaccgugcugcaccaggacuggcugaacggcaaggaguacaagugcaaggugagcaacaaggcccugcccgcccccaucgagaagaccaucagcaaggccaagggccagcccagagagccccagguguacacccugccccccagcagagacgagcugaccaagaaccaggugagccugaccugccuggugaagggcuucuaccccagcgacaucgccguggagugggagagcaacggccagcccgagaacaacuacaagaccaccccccccgugcuggacagcgacggcagcuucuuccuguacagcaagcugaccguggacaagagcagauggcagcagggcaacguguucagcugcagcgugaugcacgaggcccugcacaaccacuacacccagaagagccugagccugagccccggcaagugaccaugcauuugaaagccgggggugggagauccggauugccagucugcucgauaucgcaggcuggguccgugacuacccacucccccuuuaauuccgccccucucccuccccccccccuaacguuacuggccgaagccgcuuggaauaaggccggugugcguuugucuauauguuauuuuccaccauauugccgucuuuuggcaaugugagggcccggaaaccuggcccugucuucuugacgagcauuccuaggggucuuuccccucucgccaaaggaaugcaaggucuguugaaugucgugaaggaagcaguuccucuggaagcuucuugaagacaaacaacgucuguagcgacccuuugcaggcagcggaaccccccaccuggcgacaggugccucugcggccaaaagccacguguauaagauacaccugcaaaggcggcacaaccccagugccacguugugaguuggauaguuguggaaagagucaaauggcucuccucaagcguauucaacaaggggcugaaggaugcccagaagguaccccauuguaugggaucugaucuggggccucggugcacaugcuuuacguguguuuagucgagguuaaaaaacgucuaggccccccgaaccacggggacgugguuuuccuuugaaaaacacgaugauaauagaucuaccauggagacccccgcccagcugcuguuccugcugcugcuguggcugcccgacaccaccggcgagaucgugcugacccagagccccggcacccugagccugagccccggcgagagagccacccugagcugcagagccagccagagcgugggcagcagcuaccuggccugguaccagcagaagcccggccaggcccccagacugcugaucuacggcgccuucagcagagccaccggcauccccgacagauucagcggcagcggcagcggcaccgacuucacccugaccaucagcagacuggagcccgaggacuucgccguguacuacugccagcaguacggcagcagccccuggaccuucggccagggcaccaagguggagaucaagagaaccguggccgcccccagcguguucaucuucccccccagcgacgagcagcugaagagcggcaccgccagcguggugugccugcugaacaacuucuaccccagagaggccaaggugcaguggaagguggacaacgcccugcagagcggcaacagccaggagagcgugaccgagcaggacagcaaggacagcaccuacagccugagcagcacccugacccugagcaaggccgacuacgagaagcacaagguguacgccugcgaggugacccaccagggccugagcagccccgugaccaagagcuucaacagaggcgagugcugaggacuaguuauaagacugacuagcccgaugggccucccaacgggcccuccuccccuccuugcaccgagauuaauaaaaaaaaaaaaaaaaaaaaaaaaaaaaaaaaaaaaaaaaaaaaaaaaaaaaaaaaaaaaaaaaugcaucccccccccccccccccccccccccccccccaaaggcucuuuucagagccaccagaauu

SEQ ID NO: 923 - RNA, 2392 nt, Artificial Sequence
  Ipilimumab opt1 F2A construct
gggagaaagcuuaccauggagcugggccucagcuggaucuuccugcuggccauccucaagggggugcagugccaggugcagcuggucgagagcggcgggggcguggugcagcccgggcgcucccuccggcugagcugcgccgccuccggcuucaccuucagcuccuacaccaugcacuggguccgccaggcgccggggaagggccuggagugggugacguucaucagcuacgacggcaacaacaaguacuacgccgacuccgugaaggggcgguucaccaucagccgcgacaacuccaagaacacccucuaccugcagaugaacagccugcgggccgaggacaccgccaucuacuacugcgcccgcacgggcuggcucgggcccuucgacuacuggggccaggggacccuggucaccguguccagcgcguccaccaagggccccagcguguucccccuggccccguccagcaaguccacgagcggcgggaccgccgcccucggcugccuggucaaggacuacuuccccgagcccgugaccguguccuggaacagcggggcgcugaccagcggcguccacacguuccccgccgugcuccaguccagcggccuguacucccugagcuccguggucaccgugccgagcuccagccucgggacccagaccuacaucugcaacgugaaccacaagcccuccaacacgaaggucgacaagcggguggagcccaagagcugcgacaagacccacacgugcccgcccugccccgcccccgagcugcugggcgggcccuccguguuccucuucccgcccaagcccaaggacacccugaugaucagccgcacccccgaggugaccugcgucguggucgacgugucccacgaggacccggaggucaaguucaacugguacguggacggcguggagguccacaacgccaagaccaagccccgggaggagcaguacaacagcaccuaccgcgugguguccguccugacggugcuccaccaggacuggcugaacgggaaggaguacaagugcaaggugagcaacaaggcccugcccgcgcccaucgagaagaccaucuccaaggccaagggccagccgcgggagccccaggucuacacccucccgcccagccgcgacgagcugaccaagaaccaggugucccugacgugccucgugaagggcuucuaccccagcgacaucgccgucgagugggagagcaacgggcagcccgagaacaacuacaagaccacgcccccggugcuggacuccgacggcagcuucuuccuguacuccaagcucaccguggacaagagccgguggcagcaggggaacgucuucuccugcagcgugaugcacgaggcccugcacaaccacuacacccagaagucccugagccucucccccggcaaggugaagcagacacucaauuucgaccuucugaaguuggcuggagauguugagucuaacccaggccccauggagacccccgcccagcugcucuuccugcugcuccuguggcugccggacaccacgggcgagaucgugcugacccagagccccggcacccucucccugagcccgggggagcgcgccacgcuguccugccgggccagccaguccgucggcagcuccuaccucgcgugguaccagcagaagcccgggcaggcgccccgccugcugaucuacggcgccuucagccgggccaccgggauccccgaccgcuucuccggcagcggcuccgggaccgacuucacccucacgaucagccggcuggagccggaggacuucgccguguacuacugccagcaguacggcuccagccccuggaccuucgggcagggcaccaagguggagaucaagcgcaccgucgccgcccccuccguguucaucuucccgcccagcgacgagcagcugaaguccgggacggccagcguggucugccuccugaacaacuucuacccccgggaggccaaggugcaguggaagguggacaacgcgcugcaguccggcaacagccaggagagcgucaccgagcaggacuccaaggacagcaccuacucccucagcuccacccugacgcugagcaaggccgacuacgagaagcacaagguguacgccugcgaggugacccaccagggccucuccagccccgucaccaaguccuucaaccgcggggagugcugaggacuaguuauaagacugacuagcccgaugggccucccaacgggcccuccuccccuccuugcaccgagauuaauaaaaaaaaaaaaaaaaaaaaaaaaaaaaaaaaaaaaaaaaaaaaaaaaaaaaaaaaaaaaaaaaugcaucccccccccccccccccccccccccccccccaaaggcucuuuucagagccaccagaauu

SEQ ID NO: 924 - RNA, 2392 nt, Artificial Sequence
  Ipilimumab opt3 F2A construct
gggagaaagcuuaccauggagcugggccucagcuggaucuuccuucuggccauuuugaagggggugcagugccaaguccaguuaguugaauccggagguggcgugguacagcccgggagaucucugaggcuaucaugugcugcaaguggauuuaccuucagcuccuacacaaugcacugggugcggcaggccccuggcaaaggucucgagugggucacuuuuauaucuuaugacgggaacaauaaguacuaugcggauucggugaaaggacgcuucacgaucucacgagacaacagcaagaauacccuguaccuucaaaugaacagucugcgugcugaagauacagccauuuauuacugcgcaagaacuggcugguugggcccauuugacuauugggggcagggaacccucguuacaguguccucugccagcaccaaagguccguccgucuucccccuggcuccuucaaguaagagcacuucuggcgggacagcagcccugggaugucucgugaaggauuacuuuccagagcccguaaccguuuccuggaacucaggcgcuuuaacgagcggugugcauacuuucccugccguccugcagaguucugggcuuuacuccuugagcucgguggugaccgucccaucuuccucacugggaacacagacuuauaucugcaauguuaaucacaaacccaguaacaccaagguggacaaaaggguagaaccuaagagcugugauaaaacacauaccugcccaccgugucccgcgccugagcuacucggcggcccauccguguuucuguuucccccuaagccaaaggacacgcuuaugauuucucggacucccgaggucacaugcgugguuguggaugucagccacgaagacccggaggugaaauuuaauugguacguagaugggguugaagugcauaacgcaaagaccaaaccucgcgaggagcaauauaauucaacuuacagagucgugaguguccugacaguguugcaccaggacuggcucaacggaaaggaauauaaauguaagguuuccaauaaagcccugcccgcuccaaucgagaagaccauaagcaaggccaaaggucagccuagggaaccccagguguacacguuaccacccucucgggaugagcugaccaagaaccaaguaucacucacaugccuugucaaaggcuucuauccuagugacaucgcaguggaaugggagagcaaugggcagccagagaacaacuacaagacuaccccgcccguucuggacuccgauggaucuuucuucuuguacucgaaacuaacaguggacaagagccgcuggcagcaaggcaaugucuucuccuguucagugaugcacgaagcucugcauaaccacuauacucagaagagucucucucugagcccugguaaagugaagcagacacucaauuucgaccuucugaaguuggcuggagauguugagucuaacccaggccccauggagacccccgcccagcuucucuuccuucuguuguuauggcugccugacacaacuggcgaaaucgugcuaacgcaaagcccagggacccucucccugucuccgggagagagagcuacacuuucaugcagggcaagucagagcgucgguuccucuuaccuggccugguaucagcagaagcccggccaagcgccucgguugcucauuuacggggcuuuuucgcgcgccacuggaauaccagaucgauucucaggcagcgguagugggaccgacuuuacacugaccaucucccgucuggaacccgaggauuucgcaguuuauuacugucagcaguauggaucuagcccuuggacuuuuggccagggcacaaaaguggaaauuaagagaaccguagccgcuccauccguguucaucuuucccccuucagacgagcaacucaaaagugggacggcaagcgucgugugcuuacugaacaauuucuacccaagggaggccaagguucaguggaaaguggauaacgcucugcagucuggaaauucccaggaaucagucacugagcaagacagcaaggauaguaccuauucuuuguccagcacacugacucuaucgaaggccgacuacgaaaaacacaagguguacgcgugugagguaacccaucagggucucucuuccccgguuacaaaaucauuuaaccggggcgagugcugaggacuaguuauaagacugacuagcccgaugggccucccaacgggcccuccuccccuccuugcaccgagauuaauaaaaaaaaaaaaaaaaaaaaaaaaaaaaaaaaaaaaaaaaaaaaaaaaaaaaaaaaaaaaaaaaugcaucccccccccccccccccccccccccccccccaaaggcucuuuucagagccaccagaauu

SEQ ID NO: 925 - RNA, 2392 nt, Artificial Sequence
  Ipilimumab opt4 F2A construct
gggagaaagcuuaccauggagcugggccugagcuggaucuuccugcuggccauccugaagggcgugcagugccaggugcagcugguggagagcggcggcggcguggugcagcccggcagaagccugagacugagcugcgccgccagcggcuucaccuucagcagcuacaccaugcacugggugagacaggcccccggcaagggccuggagugggugaccuucaucagcuacgacggcaacaacaaguacuacgccgacagcgugaagggcagauucaccaucagcagagacaacagcaagaacacccuguaccugcagaugaacagccugagagccgaggacaccgccaucuacuacugcgccagaaccggcuggcugggccccuucgacuacuggggccagggcacccuggugaccgugagcagcgccagcaccaagggccccagcguguucccccuggcccccagcagcaagagcaccagcggcggcaccgccgcccugggcugccuggugaaggacuacuuccccgagcccgugaccgugagcuggaacagcggcgcccugaccagcggcgugcacaccuuccccgccgugcugcagagcagcggccuguacagccugagcagcguggugaccgugcccagcagcagccugggcacccagaccuacaucugcaacgugaaccacaagcccagcaacaccaagguggacaagagaguggagcccaagagcugcgacaagacccacaccugcccccccugccccgcccccgagcugcugggcggccccagcguguuccuguucccccccaagcccaaggacacccugaugaucagcagaacccccgaggugaccugcguggugguggacgugagccacgaggaccccgaggugaaguucaacugguacguggacggcguggaggugcacaacgccaagaccaagcccagagaggagcaguacaacagcaccuacagaguggugagcgugcugaccgugcugcaccaggacuggcugaacggcaaggaguacaagugcaaggugagcaacaaggcccugcccgcccccaucgagaagaccaucagcaaggccaagggccagcccagagagccccagguguacacccugccccccagcagagacgagcugaccaagaaccaggugagccugaccugccuggugaagggcuucuaccccagcgacaucgccguggagugggagagcaacggccagcccgagaacaacuacaagaccaccccccccgugcuggacagcgacggcagcuucuuccuguacagcaagcugaccguggacaagagcagauggcagcagggcaacguguucagcugcagcgugaugcacgaggcccugcacaaccacuacacccagaagagccugagccugagccccggcaaggugaagcagacacucaauuucgaccuucugaaguuggcuggagauguugagucuaacccaggccccauggagacccccgcccagcugcuguuccugcugcugcuguggcugcccgacaccaccggcgagaucgugcugacccagagccccggcacccugagccugagccccggcgagagagccacccugagcugcagagccagccagagcgugggcagcagcuaccuggccugguaccagcagaagcccggccaggcccccagacugcugaucuacggcgccuucagcagagccaccggcauccccgacagauucagcggcagcggcagcggcaccgacuucacccugaccaucagcagacuggagcccgaggacuucgccguguacuacugccagcaguacggcagcagccccuggaccuucggccagggcaccaagguggagaucaagagaaccguggccgcccccagcguguucaucuucccccccagcgacgagcagcugaagagcggcaccgccagcguggugugccugcugaacaacuucuaccccagagaggccaaggugcaguggaagguggacaacgcccugcagagcggcaacagccaggagagcgugaccgagcaggacagcaaggacagcaccuacagccugagcagcacccugacccugagcaaggccgacuacgagaagcacaagguguacgccugcgaggugacccaccagggccugagcagccccgugaccaagagcuucaacagaggcgagugcugaggacuaguuauaagacugacuagcccgaugggccucccaacgggcccuccuccccuccuugcaccgagauuaauaaaaaaaaaaaaaaaaaaaaaaaaaaaaaaaaaaaaaaaaaaaaaaaaaaaaaaaaaaaaaaaaugcaucccccccccccccccccccccccccccccccaaaggcucuuuucagagccaccagaauu

SEQ ID NO: 926 - RNA, 1621 nt, Artificial Sequence; identical to SEQ ID NO: 594
  Ipilimumab HC with signale peptide

SEQ ID NO: 927 - RNA, 1621 nt, Artificial Sequence; identical to SEQ ID NO: 861
  Ipilimumab HC with signale peptide

SEQ ID NO: 928 - RNA, 1621 nt, Artificial Sequence; identical to SEQ ID NO: 862
  Ipilimumab HC with signale peptide

SEQ ID NO: 929 - RNA, 1621 nt, Artificial Sequence; identical to SEQ ID NO: 863
  Ipilimumab HC with signale peptide

SEQ ID NO: 930 - RNA, 1621 nt, Artificial Sequence; identical to SEQ ID NO: 864
  Ipilimumab HC with signale peptide

SEQ ID NO: 931 - RNA, 1621 nt, Artificial Sequence; identical to SEQ ID NO: 865
  Ipilimumab HC with signale peptide

SEQ ID NO: 932 - RNA, 1621 nt, Artificial Sequence; identical to SEQ ID NO: 866
  Ipilimumab HC with signale peptide

SEQ ID NO: 933 - RNA, 1621 nt, Artificial Sequence; identical to SEQ ID NO: 867
  Ipilimumab HC with signale peptide

SEQ ID NO: 934 - RNA, 1621 nt, Artificial Sequence; identical to SEQ ID NO: 868
  Ipilimumab HC with signale peptide

SEQ ID NO: 935 - RNA, 1621 nt, Artificial Sequence; identical to SEQ ID NO: 869
  Ipilimumab HC with signale peptide

SEQ ID NO: 936 - RNA, 1621 nt, Artificial Sequence; identical to SEQ ID NO: 870
  Ipilimumab HC with signale peptide

SEQ ID NO: 937 - RNA, 1621 nt, Artificial Sequence; identical to SEQ ID NO: 871
  Ipilimumab HC with signale peptide

SEQ ID NO: 938 - RNA, 1621 nt, Artificial Sequence; identical to SEQ ID NO: 872
  Ipilimumab backbone Rituximab HC with signale peptide

SEQ ID NO: 939 - RNA, 1621 nt, Artificial Sequence; identical to SEQ ID NO: 873
  Ipilimumab backbone Rituximab HC with signale peptide

SEQ ID NO: 940 - RNA, 1621 nt, Artificial Sequence; identical to SEQ ID NO: 874
  Ipilimumab backbone Rituximab HC with signale peptide

SEQ ID NO: 941 - RNA, 1564 nt, Artificial Sequence; identical to SEQ ID NO: 875
  Ipilimumab HC without signale peptide

SEQ ID NO: 942 - RNA, 1564 nt, Artificial Sequence; identical to SEQ ID NO: 876
  Ipilimumab HC without signale peptide

SEQ ID NO: 943 - RNA, 1564 nt, Artificial Sequence; identical to SEQ ID NO: 877
  Ipilimumab HC without signale peptide

SEQ ID NO: 944 - RNA, 1564 nt, Artificial Sequence; identical to SEQ ID NO: 878
  Ipilimumab HC without signale peptide

SEQ ID NO: 945 - RNA, 1564 nt, Artificial Sequence; identical to SEQ ID NO: 879
  Ipilimumab HC without signale peptide

SEQ ID NO: 946 - RNA, 1564 nt, Artificial Sequence; identical to SEQ ID NO: 880
  Ipilimumab HC without signale peptide

SEQ ID NO: 947 - RNA, 1564 nt, Artificial Sequence; identical to SEQ ID NO: 881
  Ipilimumab HC without signale peptide

SEQ ID NO: 948 - RNA, 1564 nt, Artificial Sequence; identical to SEQ ID NO: 882
  Ipilimumab HC without signale peptide

SEQ ID NO: 949 - RNA, 1564 nt, Artificial Sequence; identical to SEQ ID NO: 883
  Ipilimumab HC without signale peptide

SEQ ID NO: 950 - RNA, 1564 nt, Artificial Sequence; identical to SEQ ID NO: 884
  Ipilimumab HC without signale peptide

SEQ ID NO: 951 - RNA, 1564 nt, Artificial Sequence; identical to SEQ ID NO: 885
  Ipilimumab HC without signale peptide

SEQ ID NO: 952 - RNA, 1564 nt, Artificial Sequence; identical to SEQ ID NO: 886
  Ipilimumab HC without signale peptide

SEQ ID NO: 953 - RNA, 1564 nt, Artificial Sequence; identical to SEQ ID NO: 887
  Ipilimumab backbone Rituximab HC without signale peptide

SEQ ID NO: 954 - RNA, 1564 nt, Artificial Sequence; identical to SEQ ID NO: 888
  Ipilimumab backbone Rituximab HC without signale peptide

SEQ ID NO: 955 - RNA, 1564 nt, Artificial Sequence; identical to SEQ ID NO: 889
  Ipilimumab backbone Rituximab HC without signale peptide

SEQ ID NO: 956 - RNA, 925 nt, Artificial Sequence; identical to SEQ ID NO: 595
  Ipilimumab LC with signale peptide

SEQ ID NO: 957 - RNA, 925 nt, Artificial Sequence; identical to SEQ ID NO: 891
  Ipilimumab LC with signale peptide

SEQ ID NO: 958 - RNA, 925 nt, Artificial Sequence; identical to SEQ ID NO: 892
  Ipilimumab LC with signale peptide

SEQ ID NO: 959 - RNA, 925 nt, Artificial Sequence; identical to SEQ ID NO: 893
  Ipilimumab LC with signale peptide

SEQ ID NO: 960 - RNA, 925 nt, Artificial Sequence; identical to SEQ ID NO: 894
  Ipilimumab LC with signale peptide

SEQ ID NO: 961 - RNA, 925 nt, Artificial Sequence; identical to SEQ ID NO: 895
  Ipilimumab LC with signale peptide

SEQ ID NO: 962 - RNA, 925 nt, Artificial Sequence; identical to SEQ ID NO: 896
  Ipilimumab LC with signale peptide

SEQ ID NO: 963 - RNA, 925 nt, Artificial Sequence; identical to SEQ ID NO: 897
  Ipilimumab LC with signale peptide

SEQ ID NO: 964 - RNA, 925 nt, Artificial Sequence; identical to SEQ ID NO: 898
  Ipilimumab LC with signale peptide

SEQ ID NO: 965 - RNA, 925 nt, Artificial Sequence; identical to SEQ ID NO: 899
  Ipilimumab LC with signale peptide

SEQ ID NO: 966 - RNA, 925 nt, Artificial Sequence; identical to SEQ ID NO: 900
  Ipilimumab LC with signale peptide

SEQ ID NO: 967 - RNA, 925 nt, Artificial Sequence; identical to SEQ ID NO: 901
  Ipilimumab LC with signale peptide

SEQ ID NO: 968 - RNA, 925 nt, Artificial Sequence; identical to SEQ ID NO: 902
  Ipilimumab backbone Rituximab LC with signale peptide

SEQ ID NO: 969 - RNA, 925 nt, Artificial Sequence; identical to SEQ ID NO: 903
  Ipilimumab backbone Rituximab LC with signale peptide

SEQ ID NO: 970 - RNA, 925 nt, Artificial Sequence; identical to SEQ ID NO: 904
  Ipilimumab backbone Rituximab LC with signale peptide

SEQ ID NO: 971 - RNA, 865 nt, Artificial Sequence; identical to SEQ ID NO: 905
  Ipilimumab LC without signale peptide

SEQ ID NO: 972 - RNA, 865 nt, Artificial Sequence; identical to SEQ ID NO: 906
  Ipilimumab LC without signale peptide

SEQ ID NO: 973 - RNA, 865 nt, Artificial Sequence; identical to SEQ ID NO: 907
  Ipilimumab LC without signale peptide

SEQ ID NO: 974 - RNA, 865 nt, Artificial Sequence; identical to SEQ ID NO: 908
  Ipilimumab LC without signale peptide

SEQ ID NO: 975 - RNA, 865 nt, Artificial Sequence; identical to SEQ ID NO: 909
  Ipilimumab LC without signale peptide

SEQ ID NO: 976 - RNA, 865 nt, Artificial Sequence; identical to SEQ ID NO: 910
  Ipilimumab LC without signale peptide

SEQ ID NO: 977 - RNA, 865 nt, Artificial Sequence; identical to SEQ ID NO: 911
  Ipilimumab LC without signale peptide

SEQ ID NO: 978 - RNA, 865 nt, Artificial Sequence; identical to SEQ ID NO: 912
  Ipilimumab LC without signale peptide

SEQ ID NO: 979 - RNA, 865 nt, Artificial Sequence; identical to SEQ ID NO: 913
  Ipilimumab LC without signale peptide

SEQ ID NO: 980 - RNA, 865 nt, Artificial Sequence; identical to SEQ ID NO: 914
  Ipilimumab LC without signale peptide

SEQ ID NO: 981 - RNA, 865 nt, Artificial Sequence; identical to SEQ ID NO: 915
  Ipilimumab LC without signale peptide

SEQ ID NO: 982 - RNA, 865 nt, Artificial Sequence; identical to SEQ ID NO: 916
  Ipilimumab LC without signale peptide

SEQ ID NO: 983 - RNA, 865 nt, Artificial Sequence; identical to SEQ ID NO: 917
  Ipilimumab backbone Rituximab LC without signale peptide

SEQ ID NO: 984 - RNA, 865 nt, Artificial Sequence; identical to SEQ ID NO: 918
  Ipilimumab backbone Rituximab LC without signale peptide

SEQ ID NO: 985 - RNA, 865 nt, Artificial Sequence; identical to SEQ ID NO: 919
  Ipilimumab backbone Rituximab LC without signale peptide

SEQ ID NO: 986 - RNA, 3008 nt, Artificial Sequence; identical to SEQ ID NO: 920
  Ipilimumab opt1 IRES construct

SEQ ID NO: 987 - RNA, 3008 nt, Artificial Sequence; identical to SEQ ID NO: 921
  Ipilimumab opt3 IRES construct

SEQ ID NO: 988 - RNA, 3008 nt, Artificial Sequence; identical to SEQ ID NO: 922
  Ipilimumab opt4 IRES construct

SEQ ID NO: 989 - RNA, 2392 nt, Artificial Sequence; identical to SEQ ID NO: 923
  Ipilimumab opt1 F2A construct

SEQ ID NO: 990 - RNA, 2392 nt, Artificial Sequence; identical to SEQ ID NO: 924
  Ipilimumab opt3 F2A construct

SEQ ID NO: 991 - RNA, 2392 nt, Artificial Sequence; identical to SEQ ID NO: 925
  Ipilimumab opt4 F2A construct

SEQ ID NO: 992 - RNA, 1849 nt, Artificial Sequence; identical to SEQ ID NO: 164
  IL12_opt1_gen4

SEQ ID NO: 993 - RNA, 2014 nt, Artificial Sequence; identical to SEQ ID NO: 296
  IL12_opt1_gen5

SEQ ID NO: 994 - RNA, 42 nt, Artificial Sequence; identical to SEQ ID NO: 409
  1368_5UTR

SEQ ID NO: 995 - RNA, 34 nt, Artificial Sequence
  1412_5UTR
ggagcgggcggcggcguuggcggcuugugcagca

SEQ ID NO: 996 - RNA, 34 nt, Artificial Sequence
  1413_5UTR
ggccggaaccgccaucuuccaguaauucgccaaa

SEQ ID NO: 997 - RNA, 75 nt, Artificial Sequence; identical to SEQ ID NO: 411
  1414_5UTR

SEQ ID NO: 998 - RNA, 62 nt, Artificial Sequence; identical to SEQ ID NO: 843
  1415_5UTR

SEQ ID NO: 999 - RNA, 31 nt, Artificial Sequence
  1416_5UTR
gccgcccagccgguccaggccucuggcgaac

SEQ ID NO: 1000 - RNA, 56 nt, Artificial Sequence
  1417_5UTR
agucaggaaggacguugguguugagguuagcauacguaucaaggacaguaacuacc

SEQ ID NO: 1001 - RNA, 42 nt, Artificial Sequence
  1418_5UTR
gccucugcuggaguccggggaguggcguuggcugcuagagcg

SEQ ID NO: 1002 - RNA, 34 nt, Artificial Sequence
  1419_5UTR
ggccgccgcagccaucuuccaguaacucgccaaa

SEQ ID NO: 1003 - RNA, 53 nt, Artificial Sequence
  1420_5UTR
gccaucuuggcgccuguggaggccugcugggaacaggacuucuaacagcaagu

SEQ ID NO: 1004 - DNA, 42 bp, Artificial Sequence; identical to SEQ ID NO: 408
  1368_5UTR

SEQ ID NO: 1005 - DNA, 34 bp, Artificial Sequence
  1412_5UTR
ggagcgggcggcggcgttggcggcttgtgcagca

SEQ ID NO: 1006 - DNA, 34 bp, Artificial Sequence
  1413_5UTR
ggccggaaccgccatcttccagtaattcgccaaa

SEQ ID NO: 1007 - DNA, 75 bp, Artificial Sequence; identical to SEQ ID NO: 410
  1414_5UTR

SEQ ID NO: 1008 - DNA, 62 bp, Artificial Sequence; identical to SEQ ID NO: 842
  1415_5UTR

SEQ ID NO: 1009 - DNA, 31 bp, Artificial Sequence
  1416_5UTR
gccgcccagccggtccaggcctctggcgaac

SEQ ID NO: 1010 - DNA, 56 bp, Artificial Sequence
  1417_5UTR
agtcaggaaggacgttggtgttgaggttagcatacgtatcaaggacagtaactacc

SEQ ID NO: 1011 - DNA, 42 bp, Artificial Sequence
  1418_5UTR
gcctctgctggagtccggggagtggcgttggctgctagagcg

SEQ ID NO: 1012 - DNA, 34 bp, Artificial Sequence
  1419_5UTR
ggccgccgcagccatcttccagtaactcgccaaa

SEQ ID NO: 1013 - DNA, 53 bp, Artificial Sequence
  1420_5UTR
gccatcttggcgcctgtggaggcctgctgggaacaggacttctaacagcaagt

SEQ ID NO: 1014 - RNA, 547 nt, Artificial Sequence
  R3630_(a249g)_Ndel
gggagaaagcucaagcuuauccaaguaggcuggucaccuguacaacguagccgguauuuuuuuuuuuuuuuuuuuuuugaccgucucaagguccaaguuagucugccuauaaaggugcggauccacagcugaugaaagacuugugcgguacgguuaaucuccccuuuuuuuuuuuuuuuuuuuuuaguaaaugcgucuacugaauccagcgaugaugcuggcccagaucuucgaccacaagugcauaugguagucaucgagggucgccuuuuuuuuuuuuuuuuuuuuuuuggcccaguucugagacuucgcuagagacuacaguuacagcugcaguaguaaccacugcggcuauugcaggaaaucccguucagguuuuuuuuuuuuuuuuuuuuuccgcucacuaugauuaagaaccagguggagugucacugcucucgaggucucacgagagcgcucgauacagugcuuggaagaaucuuuuuuuuuuuuuuuuuuuuuugugcgacgaucacagagaacuucuauucaugcaggucugcucuag

SEQ ID NO: 1015 - RNA, 547 nt, Artificial Sequence
  R3630_(g241a)_Nsil
gggagaaagcucaagcuuauccaaguaggcuggucaccuguacaacguagccgguauuuuuuuuuuuuuuuuuuuuuugaccgucucaagguccaaguuagucugccuauaaaggugcggauccacagcugaugaaagacuugugcgguacgguuaaucuccccuuuuuuuuuuuuuuuuuuuuuaguaaaugcgucuacugaauccagcgaugaugcuggcccagaucuucgaccacaaaugcauauaguagucaucgagggucgccuuuuuuuuuuuuuuuuuuuuuuuggcccaguucugagacuucgcuagagacuacaguuacagcugcaguaguaaccacugcggcuauugcaggaaaucccguucagguuuuuuuuuuuuuuuuuuuuuccgcucacuaugauuaagaaccagguggagugucacugcucucgaggucucacgagagcgcucgauacagugcuuggaagaaucuuuuuuuuuuuuuuuuuuuuuugugcgacgaucacagagaacuucuauucaugcaggucugcucuag

SEQ ID NO: 1016 - RNA, 547 nt, Artificial Sequence
  R3630_no_BglII
gggagaaagcucaagcuuauccaaguaggcuggucaccuguacaacguagccgguauuuuuuuuuuuuuuuuuuuuuugaccgucucaagguccaaguuagucugccuauaaaggugcggauccacagcugaugaaagacuugugcgguacgguuaaucuccccuuuuuuuuuuuuuuuuuuuuuaguaaaugcgucuacugaauccagcgaugaugcuggcccagaucaucgaccacaagugcauauaguagucaucgagggucgccuuuuuuuuuuuuuuuuuuuuuuuggcccaguucugagacuucgcuagagacuacaguuacagcugcaguaguaaccacugcggcuauugcaggaaaucccguucagguuuuuuuuuuuuuuuuuuuuuccgcucacuaugauuaagaaccagguggagugucacugcucucgaggucucacgagagcgcucgauacagugcuuggaagaaucuuuuuuuuuuuuuuuuuuuuuugugcgacgaucacagagaacuucuauucaugcaggucugcucuag

SEQ ID NO: 1017 - protein, 14 aa, Artificial Sequence
  W(Arg12)Cys
WRRRRRRRRRRRRC

SEQ ID NO: 1018 - RNA, 987 nt, Artificial Sequence
  IL12B
augugccaccaacaacucgucaucuccugguucucccucgucuuccuagccuccccacucgucgccaucugggaacucaaaaaagacguauacgucgucgaacucgacugguaccccgacgccccaggagaaauggucgucuuaaccugcgacacacccgaagaagacgguaucaccuggacccucgaccaauccuccgaaguccuaggcuccggcaagacccucaccauccaagucaaagaauuuggcgacgcaggacaauacaccugucacaaaggcggcgaaguccucagccacagccuucuccuacuccauaaaaaagaagacggcaucugguccacugacauccucaaagaccaaaaagaacccaaaaauaaaaccuuccuccgcugcgaagccaaaaacuacuccggccgauuuaccuguugguggcuaaccacaaucagcaccgaccucaccuucucagucaaauccucccgcggcucaucugacccccaaggcgucacaugcggcgccgccaccuuauccgccgaacgcguccgcggcgacaacaaagaauacgaauacuccgucgaaugucaagaagauuccgccugccccgccgccgaagaaucacuccccaucgaagucauggucgacgcaguccacaaacucaaauacgaaaacuacaccuccuccuucuucauccgcgacauaauaaaacccgacccacccaaaaaccuccaacucaaaccacucaaaaacucccgacaagucgaagucuccugggaguaccccgacaccugguccacaccacacuccuacuucucccucaccuucugcguccaaguccaaggcaaauccaaacgcgaaaaaaaagaccgcguuuucacagacaaaaccuccgccacaguaauaugccgcaaaaacgccuccaucuccguccgggcccaagaccgcuacuacuccuccuccugguccgagugggccucaguccccugcagcuga

SEQ ID NO: 1019 - RNA, 987 nt, Artificial Sequence
  IL12B
augugccaccaacaacucgucaucuccugguucucccucgucuuccuagccuccccacucgucgccaucugggaacucaaaaaagacguauacgucgucgaacucgacugguaccccgacgccccaggagaaauggucguccuaaccugcgacacacccgaagaagacgguaucaccuggacccucgaccaauccuccgaaguccuaggcuccggcaagacccucaccauccaagucaaagaauuuggcgacgcaggacaauacaccugucacaaaggcggcgaaguccucagccacagccuucuccuacuccauaaaaaagaagacggcaucugguccacugacauccucaaagaccaaaaagaacccaaaaauaaaaccuuccuccgcugcgaagccaaaaacuacuccggccgauucaccuguugguggcuaaccacaaucagcaccgaccucaccuucucagucaaauccucccgcggcucaucugacccccaaggcgucacaugcggcgccgccacccucuccgccgaacgcguccgcggcgacaacaaagaauacgaauacuccgucgaaugucaagaagacuccgccugccccgccgccgaagaaucacuccccaucgaagucauggucgacgcaguccacaaacucaaauacgaaaacuacaccuccuccuucuucauccgcgacauaauaaaacccgacccacccaaaaaccuccaacucaagccacucaaaaacucccgacaagucgaagucuccugggaguaccccgacaccugguccacaccacacuccuacuucucccucaccuucugcguccaaguccaaggcaaauccaaacgcgaaaaaaaagaccgcguuuucacagacaaaaccuccgccacaguaauaugccgcaaaaacgccuccaucuccguccgggcccaagaccgcuacuacuccuccuccugguccgagugggccucaguccccugcagcuga

SEQ ID NO: 1020 - RNA, 987 nt, Artificial Sequence; identical to SEQ ID NO: 1019
  IL12B

SEQ ID NO: 1021 - RNA, 987 nt, Artificial Sequence; identical to SEQ ID NO: 1019
  IL12B

SEQ ID NO: 1022 - RNA, 867 nt, Artificial Sequence
  PDCD1
augcaaauaccccaagcccccuggccggucgucugggccguccuccaacucggcuggcgccccggaugguuccucgauucccccgaccgcccguggaauccgcccaccuucucccccgcccucuuagucgucaccgaaggcgacaacgcgaccuucaccuguuccuuuucgaacaccucagaauccuucguccucaacugguaccgcaugucccccuccaaccaaaccgacaaacucgccgccuuccccgaagaccgaucccaacccggccaagauugccgcuuccgcgucacacaauuacccaauggacgcgacuuucacauguccgucguccgcgcccgccgcaacgacuccggcaccuaccucugcggcgccaucucguuagcccccaaagcccaaaucaaagaaucgcucagagccgaauuacgcgucaccgaacggcgcgccgaaguccccacugcgcaccccucccccucgccccgccccgccggccaauuccaaacccucgucgucggcguugucggcggcuuauuaggcucacucguccuccucgucuggguacucgccgucaucugcucccgcgccgcgcgcggcaccaucggcgcgcgccgcaccggacaacccuuaaaagaagaccccuccgccguccccgucuucuccgucgacuacggcgaacucgacuuccaauggcgcgaaaaaacgccggaaccacccgucccgugcguccccgaacaaacagaauacgcgaccaucgucuucccguccggcaugggcacauccucacccgcccgccgaggcuccgccgacggcccccgauccgcccaacccuuacgccccgaagacggccacugcuccuggcccuuauga

SEQ ID NO: 1023 - RNA, 867 nt, Artificial Sequence
  PDCD1
augcaaaucccccaagcccccuggccggucgucugggccguccuccaacucggcuggcgccccggaugguuccucgacucccccgaccgcccguggaauccgcccaccuucucccccgcccucuuagucgucaccgaaggcgacaacgcgaccuucaccuguuccuucucgaacaccucagaauccuucguccucaacugguaccgcaugucccccuccaaccaaaccgacaaacucgccgccuuccccgaagaccgaucccaacccggccaagacugccgcuuccgcgucacacaauuacccaauggacgcgacuuucacauguccgucguccgcgcccgccgcaacgacuccggcaccuaccucugcggcgccaucucguuagcccccaaagcccaaaucaaagaaucgcucagagccgaauuacgcgucaccgaacggcgcgccgaaguccccacugcgcaccccucccccucgccccgccccgccggccaauuccaaacccucgucgucggcguugucggcggcuuauuaggcucacucguccuccucgucuggguacucgccgucaucugcucccgcgccgcgcgcggcaccaucggcgcgcgccgcaccggacaacccuuaaaagaagaccccuccgccguccccgucuucuccgucgacuacggcgaacucgacuuccaauggcgcgaaaaaacgccggaaccacccgucccgugcguccccgaacaaacagaauacgcgaccaucgucuucccguccggcaugggcacauccucacccgcccgccgaggcuccgccgacggcccccgauccgcccaacccuuacgccccgaagacggccacugcuccuggccccucuga

SEQ ID NO: 1024 - RNA, 867 nt, Artificial Sequence
  PDCD1
augcaaaucccccaagcccccuggccggucgucugggccguccuccaacucggcuggcgccccggaugguuccucgacucccccgaccgcccguggaauccgcccaccuucucccccgcccucuuagucgucaccgaaggcgacaacgcgaccuucaccuguuccuucucgaacaccucagaauccuucguccucaacugguaccgcaugucccccuccaaccaaaccgacaaacucgccgccuuccccgaagaccgaucccaacccggccaagacugccgcuuccgcgucacacaauuacccaacggacgcgacuuucacauguccgucguccgcgcccgccgcaacgacuccggcaccuaccucugcggcgccaucucgcucgcccccaaagcccaaaucaaagaaucgcucagagccgaacuccgcgucaccgaacggcgcgccgaaguccccacugcgcaccccucccccucgccccgccccgccggccaauuccaaacccucgucgucggcguugucggcggccucuuaggcucacucguccuccucgucuggguacucgccgucaucugcucccgcgccgcgcgcggcaccaucggcgcgcgccgcaccggacaacccuuaaaagaagaccccuccgccguccccgucuucuccgucgacuacggcgaacucgacuuccaauggcgcgaaaaaacgccggaaccacccgucccgugcguccccgaacaaacagaauacgcgaccaucgucuucccguccggcaugggcacauccucacccgcccgccgaggcuccgccgacggcccccgauccgcccaacccuuacgccccgaagacggccacugcuccuggccccucuga

SEQ ID NO: 1025 - RNA, 786 nt, Artificial Sequence
  CD40LG
augaucgaaaccuacaaucaaaccucgccccgcagcgccgcaacaggccuccccaucuccaugaaaaucuucauguaccuccucaccgucuuccuaaucacccaaaugaucggcuccgccuuauucgccgucuaccuccaccgccgccucgacaaaaucgaagacgaacgcaaccuccacgaagacuuugucuucaugaaaacuauccaacgaugcaacaccggcgaacgaucccuaucccucuuaaacugcgaagaaauaaaaucgcaauucgaaggauucgucaaagacaucaugcuaaacaaagaagaaaccaaaaaagaaaauuccuucgaaaugcaaaaaggcgaccaaaacccccaaaucgcagcccacgucaucucagaagcaucuuccaaaaccaccuccguccuccaaugggccgaaaaaggcuacuacaccaugucaaacaaccucgucacgcucgaaaacggcaaacaacucaccgucaaacgccaaggcuuauacuacaucuacgcacaagucaccuucugcuccaaccgcgaagcauccucccaagcccccuucaucgccucccucugucucaaaucccccggccgcuucgaacgcauccuccuccgcgccgcaaauacccauuccuccgccaaaccaugcggccaacaauccauccaccucggcggcgucuucgaacuccaacccggcgccuccgucuucgucaacgucaccgaccccucccaaguaucccauggaaccggcuucaccuccuucggccuccucaaacucuga

SEQ ID NO: 1026 - RNA, 786 nt, Artificial Sequence
  CD40LG
augaucgaaaccuacaaucaaaccucgccccgcagcgccgcaacaggccuccccaucuccaugaaaaucuucauguaccuccucaccgucuuccuaaucacccaaaugaucggcuccgccuuauucgccgucuaccuccaccgccgccucgacaaaaucgaagacgaacgcaaccuccacgaagacuuugucuucaugaaaacuauccaacgaugcaacaccggcgaacgaucccuaucccuccucaacugcgaagaaauaaaaucgcaauucgaaggauucgucaaagacaucaugcuaaacaaagaagaaaccaaaaaagaaaacuccuucgaaaugcaaaaaggcgaccaaaacccccaaaucgcagcccacgucaucucagaagcaucuuccaaaaccaccuccguccuccaaugggccgaaaaaggcuacuacaccaugucaaacaaccucgucacgcucgaaaacggcaaacaacucaccgucaaacgccaaggccucuacuacaucuacgcacaagucaccuucugcuccaaccgcgaagcauccucccaagcccccuucaucgccucccucugccucaaaucccccggccgcuucgaacgcauccuccuccgcgccgcaaauacccauuccuccgccaaaccaugcggccaacaauccauccaccucggcggcgucuucgaacuccaacccggcgccuccgucuucgucaacgucaccgaccccucccaaguaucccauggaaccggcuucaccuccuucggccuccucaaacucuga

SEQ ID NO: 1027 - RNA, 786 nt, Artificial Sequence
  CD40LG
augaucgaaaccuacaaucaaaccucgccccgcagcgccgcaacaggccuccccaucuccaugaaaaucuucauguaccuccucaccgucuuccuaaucacccaaaugaucggcuccgcccuauucgccgucuaccuccaccgccgccucgacaaaaucgaagacgaacgcaaccuccacgaagacuuugucuucaugaaaacuauccaacgaugcaacaccggcgaacgaucccuaucccuccucaacugcgaagaaauaaaaucccaauucgaaggauucgucaaagacaucaugcuaaacaaagaagaaaccaaaaaagaaaacuccuucgaaaugcaaaaaggcgaccaaaacccccaaaucgcagcccacgucaucucagaagcaucuuccaaaaccaccuccguccuccaaugggccgaaaaaggcuacuacaccaugucaaacaaccucgucacccucgaaaacggcaaacaacucaccgucaaacgccaaggccucuacuacaucuacgcacaagucaccuucugcuccaaccgcgaagcauccucccaagcccccuucaucgccucccucugccucaaaucccccggccgcuucgaacgcauccuccuccgcgccgcaaauacccacuccuccgccaaaccaugcggccaacaauccauccaccucggcggcgucuucgaacuccaacccggcgccuccgucuucgucaacgucaccgaccccucccaaguaucccauggaaccggcuucaccuccuucggccuccucaaacucuga

SEQ ID NO: 1028 - RNA, 786 nt, Artificial Sequence; identical to SEQ ID NO: 1027
  CD40LG

SEQ ID NO: 1029 - RNA, 1347 nt, Artificial Sequence
  Ipilimumab_HC
caggugcaguuagucgagucgggcgggggcguggugcagcccgggcgcucccuccgguuaucgugcgccgccuccggcuucaccuucucguccuacaccaugcacuggguccgccaggcgccggggaagggcuuagagugggugacguucaucucguacgacggcaacaacaaguacuacgccgacuccgugaaggggcgguucaccaucucgcgcgacaacuccaagaacacccucuacuuacagaugaacucguuacgggccgaggacaccgccaucuacuacugcgcccgcacgggcuggcucgggcccuucgacuacuggggccaggggaccuuagucaccguguccucggcguccaccaagggccccucgguguuccccuuagccccguccucgaaguccacgucgggcgggaccgccgcccucggcugcuuagucaaggacuacuuccccgagcccgugaccguguccuggaacucgggggcguuaaccucgggcguccacacguuccccgccgugcuccaguccucgggcuuauacuccuuaucgucggucgucacggucccgucgucgucgcucgggacgcagacguacaucugcaacgucaaccacaagccgucgaacacgaaggucgacaagcgggucgagccgaagucgugcgacaagacgcacacgugcccgccgugcccggcgccggaguuauuaggggggccgucggucuuccucuucccgccgaagccgaaggacacguuaaugaucucgcgcacgccggaggucacgugcgucgucgucgacgucucgcacgaggacccggaggucaaguucaacugguacgucgacggggucgagguccacaacgcgaagacgaagccgcgggaggagcaguacaacucgacguaccgcgucgucucggucuuaacgguccuccaccaggacugguuaaacgggaaggaguacaagugcaaggucucgaacaaggcguuaccggcgccgaucgagaagacgaucucgaaggcgaaggggcagccgcgggagccgcaggucuacacgcucccgccgucgcgcgacgaguuaacgaagaaccaggucucguuaacgugccucgucaagggguucuacccgucggacaucgcggucgagugggagucgaacgggcagccggagaacaacuacaagacgacgccgccggucuuagacucggacgggucguucuucuuauacucgaagcucacggucgacaagucgcgguggcagcaggggaacgucuucucgugcucggucaugcacgaggcguuacacaaccacuacacgcagaagucguuaucgcucucgccggggaaguga

SEQ ID NO: 1030 - RNA, 1347 nt, Artificial Sequence
  Ipilimumab_HC
caggugcaguuagucgagucgggcgggggcguggugcagcccgggcgcucccuccgguuaucgugcgccgccuccggcuucaccuucucguccuacaccaugcacuggguccgccaggcgccggggaagggcuuagagugggugacguucaucucguacgacggcaacaacaaguacuacgccgacuccgugaaggggcgguucaccaucucgcgcgacaacuccaagaacacccucuacuuacagaugaacucguuacgggccgaggacaccgccaucuacuacugcgcccgcacgggcuggcucgggcccuucgacuacuggggccaggggaccuuagucaccguguccucggcguccaccaagggccccucgguguuccccuuagccccguccucgaaguccacgucgggcgggaccgccgcccucggcugcuuagucaaggacuacuuccccgagcccgugaccguguccuggaacucgggggcguuaaccucgggcguccacacguuccccgccgugcuccaguccucgggcuuauacuccuuaucguccguggucaccgugccgucguccucgcucgggacccagaccuacaucugcaacgucaaccacaagccgucgaacacgaaggucgacaagcgggucgagccgaagucgugcgacaagacgcacacgugcccgccgugcccggcgccggaguuauuaggggggccgucggucuuccucuucccgccgaagccgaaggacacguuaaugaucucgcgcacgccggaggucacgugcgucgucgucgacgucucgcacgaggacccggaggucaaguucaacugguacgucgacggggucgagguccacaacgcgaagacgaagccgcgggaggagcaguacaacucgacguaccgcgucgucucggucuuaacgguccuccaccaggacugguuaaacgggaaggaguacaagugcaaggucucgaacaaggcguuaccggcgccgaucgagaagacgaucucgaaggcgaaggggcagccgcgggagccgcaggucuacacgcucccgccgucgcgcgacgaguuaacgaagaaccaggucucguuaacgugccucgucaagggguucuacccgucggacaucgcggucgagugggagucgaacgggcagccggagaacaacuacaagacgacgccgccggucuuagacucggacgggucguucuucuuauacucgaagcucacggucgacaagucgcgguggcagcaggggaacgucuucucgugcucggucaugcacgaggcguuacacaaccacuacacgcagaagucguuaucgcucucgccggggaaguga

SEQ ID NO: 1031 - RNA, 1347 nt, Artificial Sequence
  Ipilimumab_HC
caggugcaguuagucgagucgggcgggggcguggugcagcccgggcgcucccuccgguuaucgugcgccgccuccggcuucaccuucucguccuacaccaugcacuggguccgccaggcgccggggaagggcuuagagugggugacguucaucucguacgacggcaacaacaaguacuacgccgacuccgugaaggggcgguucaccaucucgcgcgacaacuccaagaacacccucuacuuacagaugaacucguuacgggccgaggacaccgccaucuacuacugcgcccgcacgggcuggcucgggcccuucgacuacuggggccaggggaccuuagucaccguguccucggcguccaccaagggccccucgguguuccccuuagccccguccucgaaguccacgucgggcgggaccgccgcccucggcugcuuagucaaggacuacuuccccgagcccgugaccguguccuggaacucgggggcguuaaccucgggcguccacacguuccccgccgugcuccaguccucgggcuuauacuccuuaucguccguggucaccgugccgucguccucgcucgggacccagaccuacaucugcaacgugaaccacaagcccuccaacacgaaggucgacaagcggguggagcccaagucgugcgacaagacccacacgugcccgccgugcccggcgccggaguuauuaggggggccgucggucuuccucuucccgccgaagccgaaggacacguuaaugaucucgcgcacgccggaggucacgugcgucgucgucgacgucucgcacgaggacccggaggucaaguucaacugguacgucgacggggucgagguccacaacgcgaagacgaagccgcgggaggagcaguacaacucgacguaccgcgucgucucggucuuaacgguccuccaccaggacugguuaaacgggaaggaguacaagugcaaggucucgaacaaggcguuaccggcgccgaucgagaagacgaucucgaaggcgaaggggcagccgcgggagccgcaggucuacacgcucccgccgucgcgcgacgaguuaacgaagaaccaggucucguuaacgugccucgucaagggguucuacccgucggacaucgcggucgagugggagucgaacgggcagccggagaacaacuacaagacgacgccgccggucuuagacucggacgggucguucuucuuauacucgaagcucacggucgacaagucgcgguggcagcaggggaacgucuucucgugcucggucaugcacgaggcguuacacaaccacuacacgcagaagucguuaucgcucucgccggggaaguga

SEQ ID NO: 1032 - RNA, 1347 nt, Artificial Sequence
  Ipilimumab_HC
caggugcaguuagucgagucgggcgggggcguggugcagcccgggcgcucccuccgguuaucgugcgccgccuccggcuucaccuucucguccuacaccaugcacuggguccgccaggcgccggggaagggcuuagagugggugacguucaucucguacgacggcaacaacaaguacuacgccgacuccgugaaggggcgguucaccaucucgcgcgacaacuccaagaacacccucuacuuacagaugaacucguuacgggccgaggacaccgccaucuacuacugcgcccgcacgggcuggcucgggcccuucgacuacuggggccaggggaccuuagucaccguguccucggcguccaccaagggccccucgguguuccccuuagccccguccucgaaguccacgucgggcgggaccgccgcccucggcugcuuagucaaggacuacuuccccgagcccgugaccguguccuggaacucgggggcguuaaccucgggcguccacacguuccccgccgugcuccaguccucgggcuuauacuccuuaucguccguggucaccgugccgucguccucgcucgggacccagaccuacaucugcaacgugaaccacaagcccuccaacacgaaggucgacaagcggguggagcccaagucgugcgacaagacccacacgugcccgcccugccccgcccccgaguuauuaggcgggcccuccgucuuccucuucccgccgaagccgaaggacacguuaaugaucucgcgcacgccggaggucacgugcgucgucgucgacgucucgcacgaggacccggaggucaaguucaacugguacgucgacggggucgagguccacaacgcgaagacgaagccgcgggaggagcaguacaacucgacguaccgcgucgucucggucuuaacgguccuccaccaggacugguuaaacgggaaggaguacaagugcaaggucucgaacaaggcguuaccggcgccgaucgagaagacgaucucgaaggcgaaggggcagccgcgggagccgcaggucuacacgcucccgccgucgcgcgacgaguuaacgaagaaccaggucucguuaacgugccucgucaagggguucuacccgucggacaucgcggucgagugggagucgaacgggcagccggagaacaacuacaagacgacgccgccggucuuagacucggacgggucguucuucuuauacucgaagcucacggucgacaagucgcgguggcagcaggggaacgucuucucgugcucggucaugcacgaggcguuacacaaccacuacacgcagaagucguuaucgcucucgccggggaaguga

SEQ ID NO: 1033 - RNA, 1347 nt, Artificial Sequence
  Ipilimumab_HC
caggugcaguuagucgagucgggcgggggcguggugcagcccgggcgcucccuccgguuaucgugcgccgccuccggcuucaccuucucguccuacaccaugcacuggguccgccaggcgccggggaagggcuuagagugggugacguucaucucguacgacggcaacaacaaguacuacgccgacuccgugaaggggcgguucaccaucucgcgcgacaacuccaagaacacccucuacuuacagaugaacucguuacgggccgaggacaccgccaucuacuacugcgcccgcacgggcuggcucgggcccuucgacuacuggggccaggggaccuuagucaccguguccucggcguccaccaagggccccucgguguuccccuuagccccguccucgaaguccacgucgggcgggaccgccgcccucggcugcuuagucaaggacuacuuccccgagcccgugaccguguccuggaacucgggggcguuaaccucgggcguccacacguuccccgccgugcuccaguccucgggcuuauacuccuuaucguccguggucaccgugccgucguccucgcucgggacccagaccuacaucugcaacgugaaccacaagcccuccaacacgaaggucgacaagcggguggagcccaagucgugcgacaagacccacacgugcccgcccugccccgcccccgaguuauuaggcgggcccuccguguuccucuucccgcccaagcccaaggacaccuuaaugaucucgcgcacccccgaggugacgugcgucgucgucgacgucucgcacgaggacccggaggucaaguucaacugguacgucgacggggucgagguccacaacgcgaagacgaagccgcgggaggagcaguacaacucgacguaccgcgucgucucggucuuaacgguccuccaccaggacugguuaaacgggaaggaguacaagugcaaggucucgaacaaggcguuaccggcgccgaucgagaagacgaucucgaaggcgaaggggcagccgcgggagccgcaggucuacacgcucccgccgucgcgcgacgaguuaacgaagaaccaggucucguuaacgugccucgucaagggguucuacccgucggacaucgcggucgagugggagucgaacgggcagccggagaacaacuacaagacgacgccgccggucuuagacucggacgggucguucuucuuauacucgaagcucacggucgacaagucgcgguggcagcaggggaacgucuucucgugcucggucaugcacgaggcguuacacaaccacuacacgcagaagucguuaucgcucucgccggggaaguga

SEQ ID NO: 1034 - RNA, 1347 nt, Artificial Sequence
  Ipilimumab_HC
caggugcaguuagucgagucgggcgggggcguggugcagcccgggcgcucccuccgguuaucgugcgccgccuccggcuucaccuucucguccuacaccaugcacuggguccgccaggcgccggggaagggcuuagagugggugacguucaucucguacgacggcaacaacaaguacuacgccgacuccgugaaggggcgguucaccaucucgcgcgacaacuccaagaacacccucuacuuacagaugaacucguuacgggccgaggacaccgccaucuacuacugcgcccgcacgggcuggcucgggcccuucgacuacuggggccaggggaccuuagucaccguguccucggcguccaccaagggccccucgguguuccccuuagccccguccucgaaguccacgucgggcgggaccgccgcccucggcugcuuagucaaggacuacuuccccgagcccgugaccguguccuggaacucgggggcguuaaccucgggcguccacacguuccccgccgugcuccaguccucgggcuuauacuccuuaucguccguggucaccgugccgucguccucgcucgggacccagaccuacaucugcaacgugaaccacaagcccuccaacacgaaggucgacaagcggguggagcccaagucgugcgacaagacccacacgugcccgcccugccccgcccccgaguuauuaggcgggcccuccguguuccucuucccgcccaagcccaaggacaccuuaaugaucucgcgcacccccgaggugaccugcgucguggucgacgugucccacgaggacccggaggucaaguucaacugguacguggacggcguggagguccacaacgcgaagacgaagccgcgggaggagcaguacaacucgacguaccgcgucgucucggucuuaacgguccuccaccaggacugguuaaacgggaaggaguacaagugcaaggucucgaacaaggcguuaccggcgccgaucgagaagacgaucucgaaggcgaaggggcagccgcgggagccgcaggucuacacgcucccgccgucgcgcgacgaguuaacgaagaaccaggucucguuaacgugccucgucaagggguucuacccgucggacaucgcggucgagugggagucgaacgggcagccggagaacaacuacaagacgacgccgccggucuuagacucggacgggucguucuucuuauacucgaagcucacggucgacaagucgcgguggcagcaggggaacgucuucucgugcucggucaugcacgaggcguuacacaaccacuacacgcagaagucguuaucgcucucgccggggaaguga

SEQ ID NO: 1035 - RNA, 1347 nt, Artificial Sequence
  Ipilimumab_HC
caggugcaguuagucgagucgggcgggggcguggugcagcccgggcgcucccuccgguuaucgugcgccgccuccggcuucaccuucucguccuacaccaugcacuggguccgccaggcgccggggaagggcuuagagugggugacguucaucucguacgacggcaacaacaaguacuacgccgacuccgugaaggggcgguucaccaucucgcgcgacaacuccaagaacacccucuacuuacagaugaacucguuacgggccgaggacaccgccaucuacuacugcgcccgcacgggcuggcucgggcccuucgacuacuggggccaggggaccuuagucaccguguccucggcguccaccaagggccccucgguguuccccuuagccccguccucgaaguccacgucgggcgggaccgccgcccucggcugcuuagucaaggacuacuuccccgagcccgugaccguguccuggaacucgggggcguuaaccucgggcguccacacguuccccgccgugcuccaguccucgggcuuauacuccuuaucguccguggucaccgugccgucguccucgcucgggacccagaccuacaucugcaacgugaaccacaagcccuccaacacgaaggucgacaagcggguggagcccaagucgugcgacaagacccacacgugcccgcccugccccgcccccgaguuauuaggcgggcccuccguguuccucuucccgcccaagcccaaggacaccuuaaugaucucgcgcacccccgaggugaccugcgucguggucgacgugucccacgaggacccggaggucaaguucaacugguacguggacggcguggagguccacaacgccaagaccaagccccgggaggagcaguacaacucgaccuaccgcguggugucggucuuaacgguccuccaccaggacugguuaaacgggaaggaguacaagugcaaggucucgaacaaggcguuaccggcgccgaucgagaagacgaucucgaaggcgaaggggcagccgcgggagccgcaggucuacacgcucccgccgucgcgcgacgaguuaacgaagaaccaggucucguuaacgugccucgucaagggguucuacccgucggacaucgcggucgagugggagucgaacgggcagccggagaacaacuacaagacgacgccgccggucuuagacucggacgggucguucuucuuauacucgaagcucacggucgacaagucgcgguggcagcaggggaacgucuucucgugcucggucaugcacgaggcguuacacaaccacuacacgcagaagucguuaucgcucucgccggggaaguga

SEQ ID NO: 1036 - RNA, 1347 nt, Artificial Sequence
  Ipilimumab_HC
caggugcaguuagucgagucgggcgggggcguggugcagcccgggcgcucccuccgguuaucgugcgccgccuccggcuucaccuucucguccuacaccaugcacuggguccgccaggcgccggggaagggcuuagagugggugacguucaucucguacgacggcaacaacaaguacuacgccgacuccgugaaggggcgguucaccaucucgcgcgacaacuccaagaacacccucuacuuacagaugaacucguuacgggccgaggacaccgccaucuacuacugcgcccgcacgggcuggcucgggcccuucgacuacuggggccaggggaccuuagucaccguguccucggcguccaccaagggccccucgguguuccccuuagccccguccucgaaguccacgucgggcgggaccgccgcccucggcugcuuagucaaggacuacuuccccgagcccgugaccguguccuggaacucgggggcguuaaccucgggcguccacacguuccccgccgugcuccaguccucgggcuuauacuccuuaucguccguggucaccgugccgucguccucgcucgggacccagaccuacaucugcaacgugaaccacaagcccuccaacacgaaggucgacaagcggguggagcccaagucgugcgacaagacccacacgugcccgcccugccccgcccccgaguuauuaggcgggcccuccguguuccucuucccgcccaagcccaaggacaccuuaaugaucucgcgcacccccgaggugaccugcgucguggucgacgugucccacgaggacccggaggucaaguucaacugguacguggacggcguggagguccacaacgccaagaccaagccccgggaggagcaguacaacucgaccuaccgcgugguguccgucuuaacggugcuccaccaggacugguuaaacgggaaggaguacaagugcaaggugucgaacaaggccuuacccgcgcccaucgagaagaccaucucgaaggcgaaggggcagccgcgggagccgcaggucuacacgcucccgccgucgcgcgacgaguuaacgaagaaccaggucucguuaacgugccucgucaagggguucuacccgucggacaucgcggucgagugggagucgaacgggcagccggagaacaacuacaagacgacgccgccggucuuagacucggacgggucguucuucuuauacucgaagcucacggucgacaagucgcgguggcagcaggggaacgucuucucgugcucggucaugcacgaggcguuacacaaccacuacacgcagaagucguuaucgcucucgccggggaaguga

SEQ ID NO: 1037 - RNA, 648 nt, Artificial Sequence
  Ipilimumab_LC
gagaucguguuaacccagucgcccggcacccucuccuuaucgccgggggagcgcgccacguuauccugccgggccucgcaguccgucggcucguccuaccucgcgugguaccagcagaagcccgggcaggcgccccgcuuauuaaucuacggcgccuucucgcgggccaccgggauccccgaccgcuucuccggcucgggcuccgggaccgacuucacccucacgaucucgcgguuagagccggaggacuucgccguguacuacugccagcaguacggcuccucgcccuggaccuucgggcagggcaccaagguggagaucaagcgcaccgucgccgcccccuccguguucaucuucccgcccucggacgagcaguuaaaguccgggacggccucgguggucugccucuuaaacaacuucuacccccgggaggccaaggugcaguggaaggucgacaacgcguuacagucggggaacucgcaggagucggucacggagcaggacucgaaggacucgacguacucgcucucgucgacguuaacguuaucgaaggcggacuacgagaagcacaaggucuacgcgugcgaggucacgcaccaggggcucucgucgccggucacgaagucguucaaccgcggggagugcuga

SEQ ID NO: 1038 - RNA, 648 nt, Artificial Sequence
  Ipilimumab_LC
gagaucguguuaacccagucgcccggcacccucuccuuaucgccgggggagcgcgccacguuauccugccgggccucgcaguccgucggcucguccuaccucgcgugguaccagcagaagcccgggcaggcgccccgcuuauuaaucuacggcgccuucucgcgggccaccgggauccccgaccgcuucuccggcucgggcuccgggaccgacuucacccucacgaucucgcgguuagagccggaggacuucgccguguacuacugccagcaguacggcuccucgcccuggaccuucgggcagggcaccaagguggagaucaagcgcaccgucgccgcccccuccguguucaucuucccgcccucggacgagcaguuaaaguccgggacggccucgguggucugccucuuaaacaacuucuacccccgggaggccaaggugcaguggaagguggacaacgcguuacaguccggcaacucgcaggagucggucacggagcaggacucgaaggacucgacguacucgcucucgucgacguuaacguuaucgaaggcggacuacgagaagcacaaggucuacgcgugcgaggucacgcaccaggggcucucgucgccggucacgaagucguucaaccgcggggagugcuga

SEQ ID NO: 1039 - RNA, 648 nt, Artificial Sequence
  Ipilimumab_LC
gagaucguguuaacccagucgcccggcacccucuccuuaucgccgggggagcgcgccacguuauccugccgggccucgcaguccgucggcucguccuaccucgcgugguaccagcagaagcccgggcaggcgccccgcuuauuaaucuacggcgccuucucgcgggccaccgggauccccgaccgcuucuccggcucgggcuccgggaccgacuucacccucacgaucucgcgguuagagccggaggacuucgccguguacuacugccagcaguacggcuccucgcccuggaccuucgggcagggcaccaagguggagaucaagcgcaccgucgccgcccccuccguguucaucuucccgcccucggacgagcaguuaaaguccgggacggccucgguggucugccucuuaaacaacuucuacccccgggaggccaaggugcaguggaagguggacaacgcguuacaguccggcaacucgcaggagucggucaccgagcaggacuccaaggacucgaccuacucgcucucgucgacguuaacguuaucgaaggcggacuacgagaagcacaaggucuacgcgugcgaggucacgcaccaggggcucucgucgccggucacgaagucguucaaccgcggggagugcuga

SEQ ID NO: 1040 - RNA, 648 nt, Artificial Sequence
  Ipilimumab_LC
gagaucguguuaacccagucgcccggcacccucuccuuaucgccgggggagcgcgccacguuauccugccgggccucgcaguccgucggcucguccuaccucgcgugguaccagcagaagcccgggcaggcgccccgcuuauuaaucuacggcgccuucucgcgggccaccgggauccccgaccgcuucuccggcucgggcuccgggaccgacuucacccucacgaucucgcgguuagagccggaggacuucgccguguacuacugccagcaguacggcuccucgcccuggaccuucgggcagggcaccaagguggagaucaagcgcaccgucgccgcccccuccguguucaucuucccgcccucggacgagcaguuaaaguccgggacggccucgguggucugccucuuaaacaacuucuacccccgggaggccaaggugcaguggaagguggacaacgcguuacaguccggcaacucgcaggagucggucaccgagcaggacuccaaggacucgaccuacucccucucguccaccuuaacguuaucgaaggcggacuacgagaagcacaaggucuacgcgugcgaggucacgcaccaggggcucucgucgccggucacgaagucguucaaccgcggggagugcuga

SEQ ID NO: 1041 - RNA, 648 nt, Artificial Sequence
  Ipilimumab_LC
gagaucguguuaacccagucgcccggcacccucuccuuaucgccgggggagcgcgccacguuauccugccgggccucgcaguccgucggcucguccuaccucgcgugguaccagcagaagcccgggcaggcgccccgcuuauuaaucuacggcgccuucucgcgggccaccgggauccccgaccgcuucuccggcucgggcuccgggaccgacuucacccucacgaucucgcgguuagagccggaggacuucgccguguacuacugccagcaguacggcuccucgcccuggaccuucgggcagggcaccaagguggagaucaagcgcaccgucgccgcccccuccguguucaucuucccgcccucggacgagcaguuaaaguccgggacggccucgguggucugccucuuaaacaacuucuacccccgggaggccaaggugcaguggaagguggacaacgcguuacaguccggcaacucgcaggagucggucaccgagcaggacuccaaggacucgaccuacucccucucguccaccuuaacguuaucgaaggccgacuacgagaagcacaagguguacgccugcgaggugacgcaccaggggcucucgucgccggucacgaagucguucaaccgcggggagugcuga

SEQ ID NO: 1042 - protein, 162 aa, Artificial Sequence
  solPD1
MQIPQAPWPVVWAVLQLGWRPGWFLALLVVTEGDNATFTCSFSNTSESFVLNWYRMSPSNQTDKLAAFPEDRSQPGQDCRFRVTQLPNGRDFHMSVVRARRNDSGTYLCGAISLAPKAQIKESLRAELRVTERRAEVPTAHPSPSPRPAGQPEFRGGGSGGG

SEQ ID NO: 1043 - RNA, 486 nt, Artificial Sequence
  solPD1
augcagaucccccaggccccguggcccguggucugggccgugcugcagcucggcuggcgccccgggugguuccuggcgcugcucguggucaccgagggcgacaacgccaccuucacgugcagcuucuccaacaccagcgaguccuucgugcugaacugguaccggaugagccccuccaaccagaccgacaagcuggccgccuucccggaggaccgcagccagcccgggcaggacugccgguuccgcgugacccagcuccccaacggccgggacuuccacauguccgucgugcgcgcccggcgcaacgacagcgggacguaccugugcggcgcgaucucccuggcccccaaggcccagaucaaggagagccuccgggccgagcugcgcgugaccgagcggcgcgcggaggucccgaccgcccaccccucccccagcccccggccggccggccagcccgaguuccgcgggggcggguccggcgggggc

SEQ ID NO: 1044 - RNA, 486 nt, Artificial Sequence
  solPD1
augcagaucccccaggcccccuggcccgucgucugggccguccuccagcucggcuggcgccccggcugguuccucgcccuccucgucgucaccgagggcgacaacgccaccuucaccugcuccuucuccaacaccuccgaguccuucguccucaacugguaccgcaugucccccuccaaccagaccgacaagcucgccgccuuccccgaggaccgcucccagcccggccaggacugccgcuuccgcgucacccagcuccccaacggccgcgacuuccacauguccgucguccgcgcccgccgcaacgacuccggcaccuaccucugcggcgccaucucccucgcccccaaggcccagaucaaggagucccuccgcgccgagcuccgcgucaccgagcgccgcgccgagguccccaccgcccaccccucccccuccccccgccccgccggccagcccgaguuccgcggcggcggcuccggcggcggc

SEQ ID NO: 1045 - RNA, 486 nt, Artificial Sequence
  solPD1
augcagaucccccaagccccuuggccaguggucugggcuguucugcagcucggcuggagaccggggugguuccuugcacuguuggugguaaccgagggagacaacgccacauuuacuugcagcuucuccaauacgucugaaucauuuguguuaaacugguacaggaugagucccagcaaucagaccgauaagcuggcggcuuucccugaggaccggucccagccaggucaagauugucgcuuucgagucacacagcuacccaacggccgugacuuccacaugucugugguuagagccaggcggaaugauucggggacuuaucucugcggagcaauuucacuggccccuaaagcucagauaaaggaaagccuucgcgcagagcugagagugaccgaaaggcgggccgaggucccaacagcucaucccaguccuuccccacgcccggccggccagcccgaguuucgaggugggggaucuggcggcggg

SEQ ID NO: 1046 - RNA, 486 nt, Artificial Sequence
  solPD1
augcagaucccccaggcccccuggcccguggugugggccgugcugcagcugggcuggagacccggcugguuccuggcccugcugguggugaccgagggcgacaacgccaccuucaccugcagcuucagcaacaccagcgagagcuucgugcugaacugguacagaaugagccccagcaaccagaccgacaagcuggccgccuuccccgaggacagaagccagcccggccaggacugcagauucagagugacccagcugcccaacggcagagacuuccacaugagcguggugagagccagaagaaacgacagcggcaccuaccugugcggcgccaucagccuggcccccaaggcccagaucaaggagagccugagagccgagcugagagugaccgagagaagagccgaggugcccaccgcccaccccagccccagccccagacccgccggccagcccgaguucagaggcggcggcagcggcggcggc

SEQ ID NO: 1047 - RNA, 486 nt, Artificial Sequence
  solPD1
augcagaucccccaagccccuuggccgguggucugggcuguucugcagcucggcuggagacccgggugguuccuggcccuucugguggugaccgagggagacaacgcgacauuuacgugcagcuucuccaauaccucugagagcuuuguccucaacugguaccggauguccccuucuaaucagacagauaagcuggcugccuuccccgaagaccgcagccagccuggccaagauuguagauuucgggugacccagcuucccaacgggcgcgacuuccacauguccguugugagagcccggcgcaaugauucuggaacauaucugugcggcgcuauuagccucgccccuaaagcucagaucaaggaaucccugagagccgagcugcgggucaccgaacgcagagcggaggugccgacagcccaucccagcccuucuccccggccugcugggcagcccgaguuucgcggaggcggcuccgggggaggc

SEQ ID NO: 1048 - RNA, 486 nt, Artificial Sequence
  solPD1
augcaaauaccacaagcuccauggccaguaguaugggcaguauuacaauuaggauggagaccaggaugguuuuuagcauuacuaguaguaacagaaggagauaaugcaacauuuacauguaguuuuucaaauacaucagaaucauuuguauuaaauugguauagaaugucaccaucaaaucaaacagauaaauuagcagcauuuccagaagacagaucacaaccaggacaagauugcagauucagaguaacacaauuaccaaacggaagagacuuucauaugucaguaguaagagcaagaagaaaugacucaggaacuuauuuaugcggagcaauaucauuagcaccaaaagcacaaauaaaagaaucacuaagagcagaauuaagaguaacagaaagaagagcagaaguucccacagcacauccaucaccaucaccaagaccagcaggacaaccagaauuuagaggaggaggaucaggaggagga

SEQ ID NO: 1049 - RNA, 486 nt, Artificial Sequence
  solPD1
augcagaucccccaagccccauggccgguggucugggcagugcugcagcucggcuggaggcccgggugguuccuggccuugcugguagugaccgagggugacaacgcgacuuuuaccugcagcuucuccaauacgagugaauccuuuguccucaacugguaccggauguccccaaguaaucagacugauaagcuggccgcauuccccgaggaccgcagccagccaggccaagauuguagguuucgggugacccaguugcccaacgggcgcgacuuccacauguccguggucagggcccggcgcaaugauagcggcaccuaucugugcggugcaauuucccucgccccaaaagcgcagaucaaggaaagucugagggccgagcugcgggugacugaacgcagggcagagguaccgaccgcccaucccagcccaagcccccggccagccgggcagcccgaguuucgcggcggcgggagcgguggcggg

SEQ ID NO: 1050 - RNA, 486 nt, Artificial Sequence
  solPD1
augcaaaucccacaagccccauggcccgucgucugggccguccuccaacucggcuggcgcccaggcugguuccuagcacuccuagucgucaccgaaggcgacaacgcaaccuucaccugcuccuucuccaacaccucagaaucauucguccucaacugguaccgcaugucccccuccaaccaaaccgacaaacucgcagccuuccccgaagacagaucacaacccggccaagacugcagauuccgcgucacccaacuccccaacggacgcgacuuccacauguccguaguccgcgcccgccgaaacgacuccggcaccuaccuaugcggcgccaucucacucgccccaaaagcacaaaucaaagaaucacucagagcagaacuacgagucaccgaaagacgcgcagaaguaccaaccgcccacccaucccccucaccccgacccgccggccaacccgaauuccgcggaggcggcuccggcggcggc

SEQ ID NO: 1051 - RNA, 486 nt, Artificial Sequence
  solPD1
augcaaaucccacaagcccccuggcccgucgucugggccguacuacaacucggauggcgacccggcugguuccuagcccuccuagucgucaccgaaggcgacaacgccaccuucaccugcuccuucucaaacacauccgaaucauucguccucaacugguaccgcaugucccccuccaaccaaaccgacaaacucgccgccuuccccgaagaccgaucccaacccggccaagacugccgauuccgcgucacccaacuacccaacggccgcgacuuccacauguccgucguccgcgcccgccgcaacgacucaggcaccuaccucuguggcgccaucucccucgcaccaaaagcccaaaucaaagaaucccuccgcgccgaacuccgcgucacagaacgcagagccgaaguccccaccgcacacccaucaccauccccccgcccagccggccaacccgaauuccgcggaggcggauccggcggcgga

SEQ ID NO: 1052 - RNA, 486 nt, Artificial Sequence
  solPD1
augcaaaucccccaagccccauggcccgucgucugggccguccuacaacucggcuggcgccccggcugguuccucgcccuccucgucgucaccgaaggcgacaacgccaccuucaccugcuccuucuccaacacaucagaauccuucguccucaacugguaccgaaugucccccucaaaccaaaccgacaaacucgccgccuuccccgaagaccgcucccaacccggccaagacugccgcuuccgagucacccaacuacccaacggccgcgacuuccacauguccgucguccgcgcccgccgcaacgacuccggcaccuaccuaugcggcgccaucucccucgcccccaaagcccaaaucaaagaaucacuccgcgccgaacuccgcgucaccgaacgccgcgccgaaguccccaccgcccaccccucccccuccccccgccccgccggacaacccgaauuccgcggcggcggaucaggcggcggc

SEQ ID NO: 1053 - RNA, 486 nt, Artificial Sequence
  solPD1
augcaaauaccacaagcaccauggccuguaguaugggcaguauuacaauuaggauggagaccaggaugguuuuuagcacuauuaguaguaacagaaggagauaaugcaacauuuacauguucauuuaguaauacaucagaaucauuuguauuaaauugguauagaaugaguccaaguaaucaaacagauaaauuagcagcauuuccagaagacagaagccaaccaggacaagauuguagauuuagaguaacacaauuaccaaauggaagagauuuucauaugaguguaguaagagcaagaagaaaugacucaggaacauaucuaugcggagcaauaagcuuagcaccaaaagcacaaauaaaagaaagcuuaagagcagaauuaagaguaacagaaagaagagcagaaguaccaacagcacauccaaguccaaguccaagaccagcaggacaaccagaauuuagaggaggaggaagugggggagga

SEQ ID NO: 1054 - RNA, 486 nt, Artificial Sequence
  solPD1
augcaaauaccacaagcaccauggccaguaguaugggcaguauuacaauuaggauggagaccaggaugguuuuuagcacuacuaguaguaacagaaggagauaaugcaacauuuacauguucauuuucaaauacaucagaaucauuuguacuaaauugguauagaaugucaccaucaaaucaaacagacaaacuagcagcauuuccagaagacagaucacaaccaggacaagauugcagauucagaguaacacaacuaccaaauggaagagacuuucauaugucaguaguaagagcaagaagaaaugauucaggaacauaucuauguggagcaauaucauuagcuccaaaagcacaaauaaaagaaucauuaagagcagaauuaagaguaacagaaagaagagcagaaguaccaacagcacauccaucaccaagcccaagaccagcaggacaaccagaauuuagaggaggaggaucaggaggagga

SEQ ID NO: 1055 - RNA, 547 nt, Artificial Sequence
  R3630_SalI
gggagaaagcucaagcuuauccaaguaggcuggucaccuguacaacguagccgguauuuuuuuuuuuuuuuuuuuuuugaccgucucaagguccaaguuagucugccuauaaaggugcggauccacagcugaugaaagacuugugcgguacgguuaaucuccccuuuuuuuuuuuuuuuuuuuuuaguaaaugcgucuacugaauccagcgaugaugcuggcccagaucuucgaccacaagugcauauaguagucaucgagggucgacuuuuuuuuuuuuuuuuuuuuuuuggcccaguucugagacuucgcuagagacuacaguuacagcugcaguaguaaccacugcggcuauugcaggaaaucccguucagguuuuuuuuuuuuuuuuuuuuuccgcucacuaugauuaagaaccagguggagugucacugcucucgaggucucacgagagcgcucgauacagugcuuggaagaaucuuuuuuuuuuuuuuuuuuuuuugugcgacgaucacagagaacuucuauucaugcaggucugcucuag

SEQ ID NO: 1056 - RNA, 547 nt, Artificial Sequence
  R3630_AatII
gggagaaagcucaagcuuauccaaguaggcuggucaccuguacaacguagccgguauuuuuuuuuuuuuuuuuuuuuugaccgucucaagguccaaguuagucugccuauaaaggugcggauccacagcugaugaaagacuugugcgguacgguuaaucuccccuuuuuuuuuuuuuuuuuuuuuaguaaaugcgucuacugaauccagcgaugaugcuggcccagaucuucgaccacaagugcauauaguagucaucgagggucgccuuuuuuuuuuuuuuuuuuuuuuuggcccaguucugagacgucgcuagagacuacaguuacagcugcaguaguaaccacugcggcuauugcaggaaaucccguucagguuuuuuuuuuuuuuuuuuuuuccgcucacuaugauuaagaaccagguggagugucacugcucucgaggucucacgagagcgcucgauacagugcuuggaagaaucuuuuuuuuuuuuuuuuuuuuuugugcgacgaucacagagaacuucuauucaugcaggucugcucuag

SEQ ID NO: 1057 - protein, 18 aa, Artificial Sequence
  CysPeptid CysHis6Arg4His6Cys
CHHHHHHRRRRHHHHHHC

SEQ ID NO: 1058 - RNA, 1632 nt, Artificial Sequence
  IL12
augugccaccaacaacucgucaucuccugguucucccucgucuuccuagccuccccacucgucgccaucugggaacucaaaaaagacguauacgucgucgaacucgacugguaccccgacgccccaggagaaauggucguccuaaccugcgacacacccgaagaagacgguaucaccuggacccucgaccaauccuccgaaguccuaggcuccggcaagacccucaccauccaagucaaagaauuuggcgacgcaggacaauacaccugucacaaaggcggcgaaguccucagccacagccuucuccuacuccauaaaaaagaagacggcaucugguccacugacauccucaaagaccaaaaagaacccaaaaauaaaaccuuccuccgcugcgaagccaaaaacuacuccggccgauucaccuguugguggcuaaccacaaucagcaccgaccucaccuucucagucaaauccucccgcggcucaucugacccccaaggcgucacaugcggcgccgccacccucuccgccgaacgcguccgcggcgacaacaaagaauacgaauacuccgucgaaugucaagaagacuccgccugccccgccgccgaagaaucacuccccaucgaagucauggucgacgcaguccacaaacucaaauacgaaaacuacaccuccuccuucuucauccgcgacauaauaaaacccgacccacccaaaaaccuccaacucaagccacucaaaaacucccgacaagucgaagucuccugggaguaccccgacaccugguccacaccacacuccuacuucucccucaccuucugcguccaaguccaaggcaaauccaaacgcgaaaaaaaagaccgcguuuucacagacaaaaccuccgccacaguaauaugccgcaaaaacgccuccaucuccguccgggcccaagaccgcuacuacuccuccuccugguccgagugggccucaguccccugcagcggcagcaccuccgggagcggcaagcccggguccggcgaggggagcaccaagggccggaaccugccgguggccacccccgaccccggcauguuccccugccugcaccacagccagaaccuccugcgcgccguguccaacaugcugcagaaggcccggcagacgcucgaguucuacccgugcaccagcgaggagaucgaccacgaggacaucaccaaggacaagaccuccacggucgaggccugccugccccuggagcucaccaagaacgagagcugccugaacucccgcgagaccagcuucaucaccaacggguccugccuggcgagccggaagacguccuucaugauggcccucugccugagcuccaucuacgaggaccugaagauguaccagguggaguucaagaccaugaacgccaagcuccugauggaccccaagcgccagaucuuccuggaccagaacaugcucgccgugaucgacgagcugaugcaggcgcugaacuucaacagcgagaccgucccccagaaguccagccucgaggagccggacuucuacaagaccaagaucaagcugugcauccugcuccacgccuuccggauccgcgccgugacgaucgaccgggugauguccuaccugaacgccagcuga

SEQ ID NO: 1059 - RNA, 984 nt, Artificial Sequence
  IL12B
augugccaccaacaacucgucaucuccugguucucccucgucuuccuagccuccccacucgucgccaucugggaacucaaaaaagacguauacgucgucgaacucgacugguaccccgacgccccaggagaaauggucgucuuaaccugcgacacacccgaagaagacgguaucaccuggacccucgaccaauccuccgaaguccuaggcuccggcaagacccucaccauccaagucaaagaauuuggcgacgcaggacaauacaccugucacaaaggcggcgaaguccucagccacagccuucuccuacuccauaaaaaagaagacggcaucugguccacugacauccucaaagaccaaaaagaacccaaaaauaaaaccuuccuccgcugcgaagccaaaaacuacuccggccgauuuaccuguugguggcuaaccacaaucagcaccgaccucaccuucucagucaaauccucccgcggcucaucugacccccaaggcgucacaugcggcgccgccaccuuauccgccgaacgcguccgcggcgacaacaaagaauacgaauacuccgucgaaugucaagaagauuccgccugccccgccgccgaagaaucacuccccaucgaagucauggucgacgcaguccacaaacucaaauacgaaaacuacaccuccuccuucuucauccgcgacauaauaaaacccgacccacccaaaaaccuccaacucaaaccacucaaaaacucccgacaagucgaagucuccugggaguaccccgacaccugguccacaccacacuccuacuucucccucaccuucugcguccaaguccaaggcaaauccaaacgcgaaaaaaaagaccgcguuuucacagacaaaaccuccgccacaguaauaugccgcaaaaacgccuccaucuccguccgggcccaagaccgcuacuacuccuccuccugguccgagugggccucaguccccugcagc

SEQ ID NO: 1060 - RNA, 984 nt, Artificial Sequence; identical to SEQ ID NO: 139
  IL12B

SEQ ID NO: 1061 - RNA, 984 nt, Artificial Sequence; identical to SEQ ID NO: 139
  IL12B

SEQ ID NO: 1062 - RNA, 984 nt, Artificial Sequence; identical to SEQ ID NO: 139
  IL12B
